(19) United States
(12) Patent Application Publication
(10) Pub. No.: US 2018/0201979 A1
(43) Pub. Date: Jul. 19, 2018

(54) GENETIC TESTING FOR PREDICTING RESISTANCE OF ACINETOBACTER SPECIES AGAINST ANTIMICROBIAL AGENTS

(71) Applicant: Ares Genetics GmbH, Vienna (AT)

(72) Inventors: Andreas KELLER, Puettlingen (DE); Susanne SCHMOLKE, Erlangen (DE); Cord Friedrich STÄHLER, Hirschberg an der Bergstrasse (DE); Christina BACKES, Saarbruecken (DE); Valentina GALATA, Saarbruecken (DE)

(21) Appl. No.: 15/743,926

(22) PCT Filed: Jul. 13, 2016
(86) PCT No.: PCT/EP2016/066628

§ 371 Date: Jan. 11, 2018

(30) Foreign Application Priority Data
Jul. 13, 2015 (EP) PCT/EP2015/065971

(51) Int. Cl. C12Q 1/689

(52) U.S. Cl. CPC C12Q 1/689; C12Q 2600/156; C12Q 2600/136

(57) ABSTRACT

The invention relates to a method of determining an infection of a patient with Acinetobacter species potentially resistant to antimicrobial drug treatment, a method of selecting a treatment of a patient suffering from an antibiotic resistant Acinetobacter infection, and a method of determining an anti-biotic resistance profile for bacterial microorganisms of Acinetobacter species, as well as computer program products used in these methods. In an exemplary method, a sample 1, is used for molecular testing 2, and then a molecular finger-print 3 is taken. The result is then compared to a reference library 4, and the result 5 is reported.

[0001] The present invention relates to a method of determining an infection of a patient with Acinetobacter species potentially resistant to antimicrobial drug treatment, a method of selecting a treatment of a patient suffering from an infection with a potentially resistant Acinetobacter strain, and a method of determining an antimicrobial drug, e.g. antibiotic, resistance profile for bacterial microorganisms of Acinetobacter species, as well as computer program products used in these methods.

[0002] Antibiotic resistance is a form of drug resistance whereby a sub-population of a microorganism, e.g. a strain of a bacterial species, can survive and multiply despite exposure to an antibiotic drug. It is a serious and health concern for the individual patient as well as a major public health issue. Timely treatment of a bacterial infection requires the analysis of clinical isolates obtained from patients with regard to antibiotic resistance, in order to select an efficacious therapy. Generally, for this purpose an association of the identified resistance with a certain microorganism (i.e. ID) is necessary.

[0003] Antibacterial drug resistance (ADR) represents a major health burden. According to the World Health Organization's antimicrobial resistance global report on surveillance, ADR leads to 25,000 deaths per year in Europe and 23,000 deaths per year in the US. In Europe, 2.5 million extra hospital days lead to societal cost of 1.5 billion euro. In the US, the direct cost of 2 million illnesses leads to 20 billion dollar direct cost. The overall cost is estimated to be substantially higher, reducing the gross domestic product (GDP) by up to 1.6%.

[0004] Acinetobacter species are gram-negative aerobe bacilli belonging to the family of Moraxellaceae. Over 20 species are described on genomic basis but phenotypic typing is challenging. Antibiotic susceptibilities and clinical relevance of the different genomic species vary significantly from nonpathogenic colonizers to major cause of nosocomial infections, including hospital-acquired and ventilator-associated pneumonia. Outbreaks of Acinetobacter infections typically occur in intensive care units and healthcare settings housing very ill patients, Acinetobacter baumannii accounts for about 80% of reported infections.

[0005] Acinetobacter species have become increasingly resistant to antibiotics over the past several years and currently present a significant challenge in treating these infections. The organism has the ability to accumulate diverse mechanisms of resistance, leading to the emergence of strains that are resistant to all commercially-available antibiotics.

[0006] In the 2013 CDC report ‘Antibiotic Resistance Threats in the United States’ where CDC has prioritized bacteria regarding level of concern into one of three categories (urgent, serious, and concerning) multidrug resistant Acinetobacter is listed as ‘serious’ threat. According to this report approximately 2% of healthcare-associated infections reported to CDC's National Healthcare Safety Network are caused by Acinetobacter, but the proportion is higher among critically ill patients on mechanical ventilators (about 7%). About 63% of Acinetobacter is considered multidrug-resistant, meaning at least three different classes of antibiotics no longer cure Acinetobacter infections.

[0007] In general the mechanisms for resistance of bacteria against antimicrobial treatments rely to a very substantial part on the organism's genetics. The respective genes or molecular mechanisms are either encoded in the genome of the bacteria or on plasmids that can be interchanged between different bacteria. The most common resistance mechanisms include:
[0008] 1) Efflux pumps are high-affinity reverse transport systems located in the membrane that transports the antibiotic out of the cell, e.g. resistance to tetracycline.
[0009] 2) Specific enzymes modify the antibiotic in a way that it loses its activity. In the case of streptomycin, the antibiotic is chemically modified so that it will no longer bind to the ribosome to block protein synthesis.
[0010] 3) An enzyme is produced that degrades the antibiotic, thereby inactivating it. For example, the penicillinases are a group of beta-lactamase enzymes that cleave the beta lactam ring of the penicillin molecule.

[0011] In addition, some pathogens show natural resistance against drugs. For example, an organism can lack a transport system for an antibiotic or the target of the antibiotic molecule is not present in the organism.

[0012] Pathogens that are in principle susceptible to drugs can become resistant by modification of existing genetic material (e.g. spontaneous mutations for antibiotic resistance, happening in a frequency of one in about 100 mio bacteria in an infection) or the acquisition of new genetic material from another source. One example is horizontal gene transfer, a process where genetic material contained in small packets of DNA can be transferred between individual bacteria of the same species or even between different species. Horizontal gene transfer may happen by transduction, transformation or conjugation.

[0013] Generally, testing for susceptibility/resistance to antimicrobial agents is performed by culturing organisms in different concentration of these agents.

[0014] In brief, agar plates are inoculated with patient sample (e.g. urine, sputum, blood, stool) overnight. On the next day individual colonies are used for identification of organisms, either by culturing or using mass spectroscopy. Based on the identity of organisms new plates containing increasing concentration of drugs used for the treatment of these organisms are inoculated and grown for additional 12-24 hours. The lowest drug concentration which inhibits growth (minimal inhibitory concentration—MIC) is used to determine susceptibility/resistance for tested drugs. The process takes at least 2 to 3 working days during which the patient is treated empirically. A significant reduction of time-to-result is needed especially in patients with life-threatening disease and to overcome the widespread misuse of antibiotics.

[0015] Recent developments include PCR based test kits for fast bacterial identification (e.g. Biomerieux Biofire Tests, Curetis Unyvero Tests). With these test the detection of selected resistance loci is possible for a very limited number of drugs, but no correlation to culture based AST is given. Mass spectroscopy is increasingly used for identification of pathogens in clinical samples (e.g. Bruker Biotyper), and research is ongoing to establish methods for the detection of susceptibility/resistance against antibiotics.

[0016] For some drugs such it is known that at least two targets are addressed, e.g. in case of Ciprofloxacin (drug bank ID 00537; http://www.drugbank.ca/drugs/DB00537) targets include DNA Topoisomerase IV, DNA Topoisomerase II and DNA Gyrase. It can be expected that this is also the case for other drugs although the respective secondary targets have not been identified yet. In case of a common regulation, both relevant genetic sites would naturally show a co-correlation or redundancy.

[0017] It is known that drug resistance can be associated with genetic polymorphisms. This holds for viruses, where resistance testing is established clinical practice (e.g. HIV genotyping). More recently, it has been shown that resistance has also genetic causes in bacteria and even higher organisms, such as humans where tumors resistance against certain cytostatic agents can be linked to genomic mutations. Wozniak et al. (BMC Genomics 2012, 13(Suppl 7):S23) disclose genetic determinants of drug resistance in Staphylococcus aureus based on genotype and phenotype data. Stoesser et al. disclose prediction of antimicrobial susceptibilities for Escherichia coli and Klebsiella pneumoniae isolates using whole genomic sequence data (J Antimicrob Chemother 2013; 68: 2234-2244).

[0018] Chewapreecha et al (Chewapreecha et al (2014) Comprehensive Identification of single nucleotide polymorphisms associated with beta-lactam resistance within pneumococcal mosaic genes. PLoS Genet 10(8): e1004547) used a comparable approach to identify mutations in gram-positive Streptococcus Pneumonia.

[0019] The fast and accurate detection of infections with Acinetobacter species and the prediction of response to antimicrobial therapy represent a high unmet clinical need.

[0020] This need is addressed by the present invention.

### SUMMARY OF THE INVENTION

[0021] The present inventors addressed this need by carrying out whole genome sequencing of a large cohort of Acinetobacter clinical isolates and comparing the genetic mutation profile to classical culture based antimicrobial susceptibility testing with the goal to develop a test which can be used to detect bacterial susceptibility/resistance against antimicrobial drugs using molecular testing.

[0022] The inventors performed extensive studies on the genome of bacteria of Acinetobacter species either susceptible or resistant to antimicrobial, e.g. antibiotic, drugs. Based on this information, it is now possible to provide a detailed analysis on the resistance pattern of Acinetobacter strains based on individual genes or mutations on a nucleotide level. This analysis involves the identification of a resistance against individual antimicrobial, e.g. antibiotic, drugs as well as clusters of them. This allows not only for the determination of a resistance to a single antimicrobial, e.g. antibiotic, drug, but also to groups of antimicrobial drugs, e.g. antibiotics such as lactam or quinolone antibiotics, or even to all relevant antibiotic drugs.

[0023] Therefore, the present invention will considerably facilitate the selection of an appropriate antimicrobial, e.g. antibiotic, drug for the treatment of an Acinetobacter infection in a patient and thus will largely improve the quality of diagnosis and treatment.

[0024] According to a first aspect, the present invention discloses a diagnostic method of determining an infection of a patient with Acinetobacter species potentially resistant to antimicrobial drug treatment, which can be also described as a method of determining an antimicrobial drug, e.g. antibiotic, resistant Acinetobacter infection of a patient, comprising the steps of:

a) obtaining or providing a sample containing or suspected of containing at least one Acinetobacter species from the patient;
b) determining the presence of at least one mutation in at least two genes from the group of genes listed in Table 1 or Table 2 below, wherein the presence of said at least two mutations is indicative of an infection with an antimicrobial drug resistant, e.g. antibiotic resistant, Acinetobacter strain in said patient.

[0025] An infection of a patient with Acinetobacter species potentially resistant to antimicrobial drug treatment herein means an infection of a patient with Acinetobacter species wherein it is unclear if the Acinetobacter species is susceptible to treatment with a specific antimicrobial drug or if it is resistant to the antimicrobial drug.

[0026] In step b) above, as well as corresponding steps, at least one mutation in at least two genes is determined, so that in total at least two mutations are determined, wherein the two mutations are in different genes.

TABLE 1
List of genes

| | | | | |
|---|---|---|---|---|
| ABTJ_00846 | ABTJ_03609 | ABTJ_02823 | ABTJ_01043 | ABTJ_00276 |
| ABTJ_01220 | ABTJ_03349 | ABTJ_00758 | ABTJ_02830 | ABTJ_03319 |
| ABTJ_00275 | ABTJ_02615 | ABTJ_01710 | ABTJ_01447 | ABTJ_00199 |
| ABTJ_03034 | ABTJ_00438 | ABTJ_03359 | ABTJ_02996 | ABTJ_03324 |
| ABTJ_00328 | ABTJ_02848 | ABTJ_01046 | ABTJ_01709 | ABTJ_03172 |
| ABTJ_03125 | ABTJ_00081 | ABTJ_03829 | ABTJ_02822 | ABTJ_02072 |
| ABTJ_02327 | ABTJ_01930 | ABTJ_02481 | ABTJ_02308 | ABTJ_01573 |
| ABTJ_00242 | ABTJ_03452 | ABTJ_03712 | ABTJ_03035 | ABTJ_03119 |
| ABTJ_01813 | ABTJ_00590 | ABTJ_00252 | ABTJ_03168 | ABTJ_03301 |
| ABTJ_00371 | ABTJ_00222 | ABTJ_03174 | ABTJ_02522 | ABTJ_02797 |

TABLE 2
List of genes

| | | | | |
|---|---|---|---|---|
| ABTJ_00846 | ABTJ_03609 | ABTJ_02823 | ABTJ_01043 | ABTJ_00276 |
| ABTJ_01220 | ABTJ_03349 | ABTJ_00758 | ABTJ_02830 | ABTJ_03319 |
| ABTJ_00275 | ABTJ_02615 | ABTJ_01710 | ABTJ_01447 | ABTJ_00199 |
| ABTJ_03034 | ABTJ_00438 | ABTJ_03359 | ABTJ_02996 | ABTJ_03324 |
| ABTJ_00328 | ABTJ_02848 | ABTJ_01046 | ABTJ_01709 | ABTJ_03172 |
| ABTJ_03125 | ABTJ_00081 | ABTJ_03829 | ABTJ_02822 | ABTJ_02072 |
| ABTJ_02327 | ABTJ_01930 | ABTJ_02481 | ABTJ_02308 | ABTJ_01573 |
| ABTJ_00242 | ABTJ_03452 | ABTJ_03712 | ABTJ_03035 | ABTJ_03119 |
| ABTJ_01813 | ABTJ_00590 | ABTJ_00252 | ABTJ_03168 | ABTJ_03301 |
| ABTJ_00371 | ABTJ_00222 | ABTJ_03174 | ABTJ_02522 | ABTJ_02797 |

[0027] According to a second aspect, the present invention relates to a method of selecting a treatment of a patient suffering from an infection with a potentially resistant Acinetobacter stain, e.g. from an antimicrobial drug, e.g. antibiotic, resistant Acinetobacter infection, comprising the steps of:

a) obtaining or providing a sample containing or suspected of containing at least one Acinetobacter species from the patient;
b) determining the presence of at least one mutation in at least two genes from the group of genes listed in Table 1 or Table 2 above, wherein the presence of said at least two mutations is indicative of a resistance to one or more antimicrobial, e.g. antibiotic, drugs;
c) identifying said at least one or more antimicrobial, e.g. antibiotic, drugs; and
d) selecting one or more antimicrobial, e.g. antibiotic, drugs different from the ones identified in step c) and being suitable for the treatment of a Acinetobacter infection.

[0028] A third aspect of the present invention relates to a method of determining an antimicrobial drug, e.g. antibiotic, resistance profile for bacterial microorganisms of Acinetobacter species, comprising:

obtaining or providing a first data set of gene sequences of a plurality of clinical isolates of Acinetobacter species;
providing a second data set of antimicrobial drug, e.g. antibiotic, resistance of the plurality of clinical isolates of Acinetobacter species;
aligning the gene sequences of the first data set to at least one, preferably one, reference genome of Acinetobacter, and/or assembling the gene sequence of the first data set, at least in part;
analyzing the gene sequences of the first data set for genetic variants to obtain a third data set of genetic variants; correlating the third data set with the second data set and statistically analyzing the correlation; and
determining the genetic sites in the genome of Acinetobacter associated with antimicrobial drug, e.g. antibiotic, resistance.

[0029] In addition, the present invention relates in a fourth aspect to a method of determining an antimicrobial drug, e.g. antibiotic, resistance profile for a bacterial microorganism belonging to the species Acinetobacter comprising the steps of

a) obtaining or providing a sample containing or suspected of containing the bacterial microorganism;
b) determining the presence of a mutation in at least one gene of the bacterial microorganism as determined by the method according to the third aspect of the present invention;
wherein the presence of a mutation is indicative of a resistance to an antimicrobial, e.g. antibiotic, drug.

[0030] Furthermore, the present invention discloses in a fifth aspect a diagnostic method of determining an infection of a patient with Acinetobacter species potentially resistant to antimicrobial drug treatment, which can, like in the first aspect, also be described as method of determining an antimicrobial drug, e.g. antibiotic, resistant Acinetobacter infection of a patient, comprising the steps of:

a) obtaining or providing a sample containing or suspected of containing a bacterial microorganism belonging to the species Acinetobacter from the patient;
b) determining the presence of at least one mutation in at least one gene of the bacterial microorganism belonging to the species Acinetobacter as determined by the method according to the third aspect of the present invention, wherein the presence of said at least one mutation is indicative of an antimicrobial drug, e.g. antibiotic, resistant Acinetobacter infection in said patient.

[0031] Also disclosed is in a sixth aspect a method of selecting a treatment of a patient suffering from an infection with a potentially resistant Acinetobacter strain, e.g. from an antimicrobial drug, e.g. antibiotic, resistant Acinetobacter infection, comprising the steps of:

a) obtaining or providing a sample containing or suspected of containing a bacterial microorganism belonging to the species Acinetobacter from the patient;
b) determining the presence of at least one mutation in at least one gene of the bacterial microorganism belonging to the species Acinetobacter as determined by the method according to the third aspect of the present invention, wherein the presence of said at least one mutation is indicative of a resistance to one or more antimicrobial, e.g. antibiotic, drugs;
c) identifying said at least one or more antimicrobial, e.g. antibiotic, drugs; and
d) selecting one or more antimicrobial, e.g. antibiotic, drugs different from the ones identified in step c) and being suitable for the treatment of a Acinetobacter infection.

[0032] A seventh aspect of the present invention relates to a method of acquiring, respectively determining, an antimicrobial drug, e.g. antibiotic, resistance profile for a bacterial microorganism of Acinetobacter species, comprising:

obtaining or providing a first data set of gene sequences of a clinical isolate of Acinetobacter species;
providing a second data set of antimicrobial drug, e.g. antibiotic, resistance of a plurality of clinical isolates of Acinetobacter species;
aligning the gene sequences of the first data set to at least one, preferably one, reference genome of Acinetobacter, and/or assembling the gene sequence of the first data set, at least in part;
analyzing the gene sequences of the first data set for genetic variants to obtain a third data set of genetic variants of the first data set;
correlating the third data set with the second data set and statistically analyzing the correlation; and
determining the genetic sites in the genome of Acinetobacter of the first data set associated with antimicrobial drug, e.g. antibiotic, resistance.

[0033] According to an eighth aspect, the present invention discloses a computer program product comprising executable instructions which, when executed, perform a method according to the third, fourth, fifth, sixth or seventh aspect of the present invention.

[0034] Further aspects and embodiments of the invention are disclosed in the dependent claims and can be taken from the following description, FIGURES and examples, without being limited thereto.

### FIGURES

[0035] The enclosed drawings should illustrate embodiments of the present invention and convey a further understanding thereof. In connection with the description they serve as explanation of concepts and principles of the invention. Other embodiments and many of the stated advantages can be derived in relation to the drawings. The elements of the drawings are not necessarily to scale towards each other. Identical, functionally equivalent and acting equal features and components are denoted in the FIGURES of the drawings with the same reference numbers, unless noted otherwise.

[0036] FIG. 1 shows schematically a read-out concept for a diagnostic test according to a method of the present invention.

### DETAILED DESCRIPTION OF THE PRESENT INVENTION

### Definitions

[0037] Unless defined otherwise, technical and scientific terms used herein have the same meaning as commonly understood by one of ordinary skill in the art to which this invention belongs.

[0038] An “antimicrobial drug” in the present invention refers to a group of drugs that includes antibiotics, antifungals, antiprotozoals, and antivirals. According to certain embodiments, the antimicrobial drug is an antibiotic.

[0039] The term “nucleic acid molecule” refers to a polynucleotide molecule having a defined sequence. It comprises DNA molecules, RNA molecules, nucleotide analog molecules and combinations and derivatives thereof, such as DNA molecules or RNA molecules with incorporated nucleotide analogs or cDNA.

[0040] The term “nucleic acid sequence information” relates to information which can be derived from the sequence of a nucleic acid molecule, such as the sequence itself or a variation in the sequence as compared to a reference sequence.

[0041] The term “mutation” relates to a variation in the sequence as compared to a reference sequence. Such a reference sequence can be a sequence determined in a predominant wild type organism or a reference organism, e.g. a defined and known bacterial strain or substrain. A mutation is for example a deletion of one or multiple nucleotides, an insertion of one or multiple nucleotides, or substitution of one or multiple nucleotides, duplication of one or a sequence of multiple nucleotides, translocation of one or a sequence of multiple nucleotides, and, in particular, a single nucleotide polymorphism (SNP).

[0042] In the context of the present invention a “sample” is a sample which comprises at least one nucleic acid molecule from a bacterial microorganism. Examples for samples are: cells, tissue, body fluids, biopsy specimens, blood, urine, saliva, sputum, plasma, serum, cell culture supernatant, swab sample and others. According to certain embodiments, the sample is a patient sample (clinical isolate).

[0043] New and highly efficient methods of sequencing nucleic acids referred to as next generation sequencing have opened the possibility of large scale genomic analysis. The term “next generation sequencing” or “high throughput sequencing” refers to high-throughput sequencing technologies that parallelize the sequencing process, producing thousands or millions of sequences at once. Examples include Massively Parallel Signature Sequencing (MPSS), Polony sequencing, 454 pyrosequencing, Illumina (Solexa) sequencing, SOLiD sequencing, Ion semiconductor sequencing, DNA nanoball sequencing, Helioscope™ single molecule sequencing, Single Molecule SMRT™ sequencing, Single Molecule real time (RNAP) sequencing, Nanopore DNA sequencing, Sequencing By Hybridization, Amplicon Sequencing, GnuBio.

[0044] Within the present description the term “microorganism” comprises the term microbe. The type of microorganism is not particularly restricted, unless noted otherwise or obvious, and, for example, comprises bacteria, viruses, fungi, microscopic algae and protozoa, as well as combinations thereof. According to certain aspects, it refers to one or more Acinetobacter species, particularly Acinetobacter baumanii, particularly containing one or more of Acinetobacter baumannii isolates, particularly referring to one or more of Acinetobacter baumannii isolates.

[0045] A reference to a microorganism or microorganisms in the present description comprises a reference to one microorganism as well a plurality of microorganisms, e.g. two, three, four, five, six or more microorganisms.

[0046] A vertebrate within the present invention refers to animals having a vertebrae, which includes mammals—including humans, birds, reptiles, amphibians and fishes. The present invention thus is not only suitable for human medicine, but also for veterinary medicine.

[0047] According to certain embodiments, the patient in the present methods is a vertebrate, more preferably a mammal and most preferred a human patient.

[0048] Before the invention is described in exemplary detail, it is to be understood that this invention is not limited to the particular component parts of the process steps of the methods described herein as such methods may vary. It is also to be understood that the terminology used herein is for purposes of describing particular embodiments only, and is not intended to be limiting. It must be noted that, as used in the specification and the appended claims, the singular forms “a,” “an” and “the” include singular and/or plural referents unless the context clearly dictates otherwise. For example, the term “a” as used herein can be understood as one single entity or in the meaning of “one or more” entities. It is also to be understood that plural forms include singular and/or plural referents unless the context clearly dictates otherwise. It is moreover to be understood that, in case parameter ranges are given which are delimited by numeric values, the ranges are deemed to include these limitation values.

[0049] Regarding the dosage of the antimicrobial, e.g. antibiotic, drugs, it is referred to the established principles of pharmacology in human and veterinary medicine. For example, Forth, Henschler, Rummel “Allgemeine und spezielle Pharmakologie und Toxikologie”, 9th edition, 2005, pp. 781-919, might be used as a guideline. Regarding the formulation of a ready-to-use medicament, reference is made to “Remington, The Science and Practice of Pharmacy”, 22^{nd} edition, 2013, pp. 777-1070.

[0050] Assembling of a gene sequence can be carried out by any known method and is not particularly limited.

[0051] According to certain embodiments, mutations that were found using alignments can also be compared or matched with alignment-free methods, e.g. for detecting single base exchanges, for example based on contigs that were found by assemblies. For example, reads obtained from sequencing can be assembled to contigs and the contigs can be compared to each other.

[0052] According to a first aspect, the present invention relates to a diagnostic method of determining an infection of a patient with Acinetobacter species potentially resistant to antimicrobial drug treatment, which can also be described as method of determining an antimicrobial drug, e.g. antibiotic, resistant Acinetobacter infection of a patient, comprising the steps of:

a) obtaining or providing a sample containing or suspected of containing at least one Acinetobacter species from the patient;
b) determining the presence of at least one mutation in at least two genes from the group of genes consisting of ABTJ_00846, ABTJ_03609, ABTJ_02823, ABTJ_01043, ABTJ_00276, ABTJ_01220, ABTJ_03349, ABTJ_00758, ABTJ_02830, ABTJ_03319, ABTJ_00275, ABTJ_02615, ABTJ_01710, ABTJ_01447, ABTJ_00199, ABTJ_03034, ABTJ_00438, ABTJ_03359, ABTJ_02996, ABTJ_03324, ABTJ_00328, ABTJ_02848, ABTJ_01046, ABTJ_01709, ABTJ_03172, ABTJ_03125, ABTJ_00081, ABTJ_03829, ABTJ_02822, ABTJ_02072, ABTJ_02327, ABTJ_01930, ABTJ_02481, ABTJ_02308, ABTJ_01573, ABTJ_00242, ABTJ_03452, ABTJ_03712, ABTJ_03035, ABTJ_03119, ABTJ_01813, ABTJ_00590, ABTJ_00252, ABTJ_03168, ABTJ_03301, ABTJ_00371, ABTJ_00222, ABTJ_03174, ABTJ_02522, and ABTJ_02797, preferably ABTJ_02823, ABTJ_01043, ABTJ_00276, ABTJ_01220, ABTJ_03349, ABTJ_00758, ABTJ_00275, ABTJ_02615, ABTJ_01710, ABTJ_01447, ABTJ_00199, ABTJ_03034, ABTJ_00438, ABTJ_03359, ABTJ_02996, ABTJ_03324, ABTJ_00328, ABTJ_02848, ABTJ_01046, ABTJ_01709, ABTJ_03172, ABTJ_03125, ABTJ_00081, ABTJ_03829, ABTJ_02822, ABTJ_02072, ABTJ_02327, ABTJ_01930, ABTJ_02481, ABTJ_02308, ABTJ_01573, ABTJ_00242, ABTJ_03452, ABTJ_03712, ABTJ_03035, ABTJ_03119, ABTJ_01813, ABTJ_00590, ABTJ_00252, ABTJ_03168, ABTJ_03301, ABTJ_00371, ABTJ_00222, ABTJ_03174, ABTJ_02522, and ABTJ_02797, further preferably ABTJ_02823, ABTJ_01043, ABTJ_01220, ABTJ_03349, ABTJ_00758, ABTJ_02615, ABTJ_01710, ABTJ_01447, ABTJ_00199, ABTJ_03034, ABTJ_00438, ABTJ_03359, ABTJ_02996, ABTJ_03324, ABTJ_00328, ABTJ_02848, ABTJ_01046, ABTJ_01709, ABTJ_03172, ABTJ_03125, ABTJ_00081, ABTJ_03829, ABTJ_02822, ABTJ_02072, ABTJ_02327, ABTJ_01930, ABTJ_02481, ABTJ_02308, ABTJ_01573, ABTJ_00242, ABTJ_03452, ABTJ_03712, ABTJ_03035, ABTJ_03119, ABTJ_01813, ABTJ_00590, ABTJ_00252, ABTJ_03168, ABTJ_03301, ABTJ_00371, ABTJ_00222, ABTJ_03174, ABTJ_02522, and ABTJ_02797, wherein the presence of said at least two mutations is indicative of an infection with an antimicrobial, e.g. antibiotic, resistant Acinetobacter strain in said patient.

[0053] In this method, as well as the other methods of the invention, the sample can be provided or obtained in any way, preferably non-invasive, and can be e.g. provided as an in vitro sample or prepared as in vitro sample.

[0054] According to certain aspects, mutations in at least two, three, four, five, six, seven, eight, nine or ten genes are determined in any of the methods of the present invention, e.g. in at least two genes or in at least three genes. Instead of testing only single genes or mutants, a combination of several variant positions can improve the prediction accuracy and further reduce false positive findings that are influenced by other factors. Therefore, it is in particular preferred to determine the presence of a mutation in 2, 3, 4, 5, 6, 7, 8 or 9 (or more) genes selected from Table 1 or 2.

[0055] For the above genes, i.e. the genes also denoted in Tables 1 and 2, the highest probability of a resistance to at least one antimicrobial drug, e.g. antibiotic, could be observed, with p-values smaller than 10⁻⁴⁰, particularly smaller than 10⁻⁵⁰, indicating the high significance of the values (n=448; α=0.05). Details regarding Tables 1 and 2 can be taken from Tables 3 and 4 (4a, 4b, 4c, 4d) disclosed in the Examples. Having at least two genes with mutations determined, a high probability of an antimicrobial drug, e.g. antibiotic, resistance could be determined. The genes in Table 1 thereby represent the 50 best genes for which a mutation was observed in the genomes of Acinetobacter species, whereas the genes in Table 2 represent the 50 best genes for which a cross-correlation could be observed for the antimicrobial drug, e.g. antibiotic, susceptibility testing for Acinetobacter species as described below.

[0056] For Acinetobacter species, surprisingly the genes determined in Tables 1 and 2 are identical, showing the high suitability of the present approach and the high significance of the genes determined, particularly the locations in the genes.

[0057] According to certain embodiments, the obtaining or providing a sample containing or suspected of containing at least one Acinetobacter species from the patient in this method—as well as the other methods of the invention—can comprise the following:

A sample of a vertebrate, e.g. a human, e.g. is provided or obtained and nucleic acid sequences, e.g. DNA or RNA sequences, are recorded by a known method for recording nucleic acid, which is not particularly limited. For example, nucleic acid can be recorded by a sequencing method, wherein any sequencing method is appropriate, particularly sequencing methods wherein a multitude of sample components, as e.g. in a blood sample, can be analyzed for nucleic acids and/or nucleic acid fragments and/or parts thereof contained therein in a short period of time, including the nucleic acids and/or nucleic acid fragments and/or parts thereof of at least one Acinetobacter species. For example, sequencing can be carried out using polymerase chain reaction (PCR), particularly multiplex PCR, or high throughput sequencing or next generation sequencing, preferably using high-throughput sequencing. For sequencing, preferably an in vitro sample is used.

[0058] The data obtained by the sequencing can be in any format, and can then be used to identify the nucleic acids, and thus genes, of the Acinetobacter species, to be identified, by known methods, e.g. fingerprinting methods, comparing genomes and/or aligning to at least one, or more, genomes of one or more species of the microorganism of interest, i.e. a reference genome, etc., forming a third data set of aligned genes for an Acinetobacter species—discarding additional data from other sources, e.g. the vertebrate. Reference genomes are not particularly limited and can be taken from several databases. Depending on the microorganism, different reference genomes or more than one reference genome can be used for aligning. Using the reference genome—as well as also the data from the genomes of other species, e.g. Acinetobacter species—mutations in the genes for each species and for the whole multitude of samples of different species, e.g. Acinetobacter species, can be obtained.

[0059] For example, it is useful in genome-wide association studies to reference the points of interest, e.g. mutations, to one constant reference for enhanced standardization. In case of the human with a high consistency of the genome and 99% identical sequences among individuals this is easy and represents the standard, as corresponding reference genomes are available in databases. In case of organisms that trigger infectious diseases (e.g. bacteria and viruses) this is much more difficult, though. One possibility is to fall back on a virtual pan genome which contains all sequences of a certain genus. A further possibility is the analysis of all available references, which is much more complex. Therein all n references from a database (e.g. RefSeq) are extracted and compared with the newly sequenced bacterial genomes k. After this, matrices (% of mapped reads, % of covered genome) are applied to estimate which reference is best suited to all new bacteria. However, n×k complete alignments are carried out.

[0060] Having a big number of references, though, stable results can be obtained, as is the case for Acinetobacter.

[0061] According to certain embodiments, the genomes of Acinetobacter species are referenced to one reference genome. However, it is not excluded that for other microorganisms more than one reference genome is used. In the present methods, the reference genome of Acinetobacter is NC 017847 as annotated at the NCBI according to certain embodiments. The reference genome is attached to this application as sequence listing with SEQ ID NO 1.

[0062] In certain embodiments, the reference sequence was obtained from Acinetobacter strain NC_017847 (http://www.ncbi.nlm.nih.gov/nuccore/NC_017847)

LOCUS NC_017847 3964912 bp DNA circular CON 1 Mar. 2015
DEFINITION Acinetobacter baumannii MDR-TJ, complete genome.
ACCESSION NC_017847 NZ_AEOE01000000 NZ_AEOE01000001 NZ_AEOE01000002
[0063] NZ_AEOE01000003 NZ_AEOE01000004

### VERSION NC_017847.1 GI:387122089

### DBLINK BioProject: PRJNA224116

[0064] BioSample: SAMN02603104
[0065] Assembly: GCF_000187205.2

### KEYWORDS RefSeq.

[0066] SOURCE Acinetobacter baumannii MDR-TJ
[0067] ORGANISM Acinetobacter baumannii MDR-TJ
   [0068] Bacteria; Proteobacteria; Gammaproteobacteria; Pseudomonadales; Moraxellaceae; Acinetobacter; Acinetobacter calcoaceticus/baumannii complex.
      REFERENCE 1 (bases 1 to 3964912)
[0069] AUTHORS Huang, H., Yang, Z. L., Wu, X. M., Wang, Y., Liu, Y. J., Luo, H., Lv, X., Gan, Y. R., Song, S. D. and Gao, F.
[0070] TITLE Complete genome sequence of Acinetobacter baumannii MDR-TJ and insights into its mechanism of antibiotic resistance

[0071] JOURNAL J. Antimicrob. Chemother. 67 (12), 2825-2832 (2012)

[0072] PUBMED 22952140

REFERENCE 2 (bases 1 to 3964912)
[0073] AUTHORS Gao, F., Wang, Y., Liu, Y. J., Wu, X. M., Lv, X., Gan, Y. R., Song, S. D. and Huang, H.
[0074] TITLE Genome sequence of Acinetobacter baumannii MDR-TJ
[0075] JOURNAL J. Bacteriol. 193 (9), 2365-2366 (2011)
[0076] PUBMED 21398552
   REFERENCE 3 (bases 1 to 3964912)
[0077] AUTHORS Huang, H., Yang, Z.-L., Wu, X.-M., Wang, Y., Liu, Y.-J., Luo, H., Lv, X., Gan, Y.-R., Song, S.-D. and Gao, F.
[0078] TITLE Direct Submission
[0079] JOURNAL Submitted (6 Apr. 2012) Department of Physics, Tianjin University, No. 92, Weijin Road, Nankai District, Tianjin 300072, China

[0080] Alternatively or in addition, the gene sequence of the first data set can be assembled, at least in part, with known methods, e.g. by de-novo assembly or mapping assembly. The sequence assembly is not particularly limited, and any known genome assembler can be used, e.g. based on Sanger, 454, Solexa, Illumina, SOLid technologies, etc., as well as hybrids/mixtures thereof.

[0081] According to certain embodiments, the data of nucleic acids of different origin than the Acinetobacter species can be removed after the nucleic acids of interest are identified, e.g. by filtering the data out. Such data can e.g. include nucleic acids of the patient, e.g. the vertebrate, e.g. human, and/or other microorganisms, etc. This can be done by e.g. computational subtraction, as developed by Meyerson et al. 2002. For this, also aligning to the genome of the vertebrate, etc., is possible. For aligning, several alignment-tools are available. This way the original data amount from the sample can be drastically reduced.

[0082] Also after such removal of “excess” data, fingerprinting and/or aligning, and/or assembly, etc. can be carried out, as described above, forming a third data set of aligned and/or assembled genes for a Acinetobacter species.

[0083] Using these techniques, genes with mutations of the Acinetobacter species can be obtained.

[0084] When testing these same Acinetobacter species for antimicrobial drug, e.g. antibiotic, susceptibility of a number of antimicrobial drugs, e.g. antibiotics, e.g. using standard culturing methods on dishes with antimicrobial drug, e.g. antibiotic, intake, as e.g. described below, the results of these antimicrobial drug, e.g. antibiotic, susceptibility tests can then be cross-referenced/correlated with the mutations in the genome of the respective Acinetobacter species. Using several, e.g. 50 or more than 50, 100 or more than 100, 200 or more than 200, 300 or more than 300, 400 or more than 400, or 440 or more than 440 different Acinetobacter species, statistical analysis can be carried out on the obtained cross-referenced data between mutations and antimicrobial drug, e.g. antibiotic, susceptibility for these number of species, using known methods.

[0085] Regarding culturing methods, samples can be e.g. cultured overnight. On the next day individual colonies can be used for identification of organisms, either by culturing or using mass spectroscopy. Based on the identity of organisms new plates containing increasing concentration of antibiotics used for the treatment of these organisms are inoculated and grown for additional 12-24 hours. The lowest drug concentration which inhibits growth (minimal inhibitory concentration—MIC) can be used to determine susceptibility/resistance for tested antibiotics.

[0086] Correlation of the nucleic acid/gene mutations with antimicrobial drug, e.g. antibiotic, resistance can be carried out in a usual way and is not particularly limited. For example, resistances can be correlated to certain genes or certain mutations, e.g. SNPs, in genes. After correlation, statistical analysis can be carried out.

[0087] In addition, statistical analysis of the correlation of the gene mutations with antimicrobial drug, e.g. antibiotic, resistance is not particularly limited and can be carried out, depending on e.g. the amount of data, in different ways, for example using analysis of variance (ANOVA) or Student's t-test, for example with a sample size n of 50 or more, 100 or more, 200 or more, 300 or more, 400 or more or 440 or more, and a level of significance (α-error-level) of e.g. 0.05 or smaller, e.g. 0.05, preferably 0.01 or smaller. A statistical value can be obtained for each gene and/or each position in the genome as well as for all antibiotics tested, a group of antibiotics or a single antibiotic. The obtained p-values can also be adapted for statistical errors, if needed.

[0088] For statistically sound results a multitude of individuals should be sampled, with n=50 or more, 100 or more, 200 or more, 300 or more, 400 or more or 440 or more, and a level of significance (α-error-level) of e.g. 0.05 or smaller, e.g. 0.05, preferably 0.01 or smaller. According to certain embodiments, particularly significant results can be obtained for n=200 or more, 300 or more, 400 or more or 440 or more.

[0089] For statistically sound results a multitude of individuals should be sampled, with n=50, 100, 200, 300, 400 or 440, and a level of significance (α-error-level) of e.g. 0.05 or smaller, e.g. 0.05, preferably 0.01 or smaller. According to certain embodiments, particularly significant results can be obtained for n=200, 300, 400 or 440.

[0090] After the above procedure has been carried out for more than 440, e.g. 448, individual species of Acinetobacter, the data disclosed in Tables 1 and 2 were obtained for the statistically best correlations between gene mutations and antimicrobial drug, e.g. antibiotic, resistances. Thus, mutations in these genes were proven as valid markers for antimicrobial drug, e.g. antibiotic, resistance.

[0091] According to a further aspect, the present invention relates in a second aspect to a method of selecting a treatment of a patient suffering from an infection with a potentially resistant Acinetobacter stain, e.g. from an antimicrobial drug, e.g. antibiotic, resistant Acinetobacter infection, comprising the steps of:

a) obtaining or providing a sample containing or suspected of containing at least one Acinetobacter species from the patient;
b) determining the presence of at least one mutation in at least two genes from the group of genes consisting of ABTJ_00846, ABTJ_03609, ABTJ_02823, ABTJ_01043, ABTJ_00276, ABTJ_01220, ABTJ_03349, ABTJ_00758, ABTJ_02830, ABTJ_03319, ABTJ_00275, ABTJ_02615, ABTJ_01710, ABTJ_01447, ABTJ_00199, ABTJ_03034, ABTJ_00438, ABTJ_03359, ABTJ_02996, ABTJ_03324, ABTJ_00328, ABTJ_02848, ABTJ_01046, ABTJ_01709, ABTJ_03172, ABTJ_03125, ABTJ_00081, ABTJ_03829, ABTJ_02822, ABTJ_02072, ABTJ_02327, ABTJ_01930, ABTJ_02481, ABTJ_02308, ABTJ_01573, ABTJ_00242, ABTJ_03452, ABTJ_03712, ABTJ_03035, ABTJ_03119, ABTJ_01813, ABTJ_00590, ABTJ_00252, ABTJ_03168, ABTJ_03301, ABTJ_00371, ABTJ_00222, ABTJ_03174, ABTJ_02522, and ABTJ_02797, preferably ABTJ_02823, ABTJ_01043, ABTJ_00276, ABTJ_01220, ABTJ_03349, ABTJ_00758, ABTJ_00275, ABTJ_02615, ABTJ_01710, ABTJ_01447, ABTJ_00199, ABTJ_03034, ABTJ_00438, ABTJ_03359, ABTJ_02996, ABTJ_03324, ABTJ_00328, ABTJ_02848, ABTJ_01046, ABTJ_01709, ABTJ_03172, ABTJ_03125, ABTJ_00081, ABTJ_03829, ABTJ_02822, ABTJ_02072, ABTJ_02327, ABTJ_01930, ABTJ_02481, ABTJ_02308, ABTJ_01573, ABTJ_00242, ABTJ_03452, ABTJ_03712, ABTJ_03035, ABTJ_03119, ABTJ_01813, ABTJ_00590, ABTJ_00252, ABTJ_03168, ABTJ_03301, ABTJ_00371, ABTJ_00222, ABTJ_03174, ABTJ_02522, and ABTJ_02797, further preferably ABTJ_02823, ABTJ_01043, ABTJ_01220, ABTJ_03349, ABTJ_00758, ABTJ_02615, ABTJ_01710, ABTJ_01447, ABTJ_00199, ABTJ_03034, ABTJ_00438, ABTJ_03359, ABTJ_02996, ABTJ_03324, ABTJ_00328, ABTJ_02848, ABTJ_01046, ABTJ_01709, ABTJ_03172, ABTJ_03125, ABTJ_00081, ABTJ_03829, ABTJ_02822, ABTJ_02072, ABTJ_02327, ABTJ_01930, ABTJ_02481, ABTJ_02308, ABTJ_01573, ABTJ_00242, ABTJ_03452, ABTJ_03712, ABTJ_03035, ABTJ_03119, ABTJ_01813, ABTJ_00590, ABTJ_00252, ABTJ_03168, ABTJ_03301, ABTJ_00371, ABTJ_00222, ABTJ_03174, ABTJ_02522, and ABTJ_02797, wherein the presence of said at least two mutations is indicative of a resistance to one or more antimicrobial, e.g. antibiotic, drugs;
c) identifying said at least one or more antimicrobial, e.g. antibiotic, drugs; and
d) selecting one or more antimicrobial, e.g. antibiotic, drugs different from the ones identified in step c) and being suitable for the treatment of an Acinetobacter infection.

[0092] In this method, the steps a) of obtaining or providing a sample and b) of determining the presence of at least one mutation are as in the method of the first aspect.

[0093] The identification of the at least one or more antimicrobial, e.g. antibiotic, drug in step c) is then based on the results obtained in step b) and corresponds to the antimicrobial, e.g. antibiotic, drug(s) that correlate(s) with the mutations. Once these antimicrobial drugs, e.g. antibiotics, are ruled out, the remaining antimicrobial drugs, e.g. antibiotic drugs/antibiotics, can be selected in step d) as being suitable for treatment.

[0094] In the description, references to the first and second aspect also apply to the 12^{th}, 13^{th}, 14^{th} and 15^{th} aspect, referring to the same genes, unless clear from the context that they don't apply.

[0095] According to certain embodiments in the method of the first or second aspect, at least a mutation in ABTJ_00846, particularly in position 884837 with regard to reference genome NC_017847 as annotated at the NCBI, is determined. For such mutation, a particularly relevant correlation with antimicrobial drug, e.g. antibiotic, resistance could be determined. In particular, the mutation in position 884837 with regard to reference genome NC_017847 as annotated at the NCBI is a non-synonymous coding, particularly a codon change tTa/tCa.

[0096] According to certain embodiments, the antimicrobial drug, e.g. antibiotic, in the method of the first or second aspect, as well as in the other methods of the invention, is at least one selected from the group of β-lactams, β-lactam inhibitors, quinolines and derivatives thereof, aminoglycosides, polyketides, respectively tetracyclines, and folate synthesis inhibitors.

[0097] In the methods of the invention the resistance of Acinetobacter to one or more antimicrobial, e.g. antibiotic, drugs can be determined according to certain embodiments. According to certain embodiments, the antimicrobial drug is an antibiotic/antibiotic drug.

[0098] According to certain embodiments of the first and/or second aspect of the invention the antimicrobial, e.g. antibiotic, drug is selected from sulfonamide, fluoroquinolone, lactam, aminoglycoside and/or polyketide antibiotics, preferably tetracycline antibiotics, and/or benzene-derived antibiotics, and the presence of a mutation in the genes of Table 1 or Table 2, preferably ABTJ_02823, ABTJ_01043, ABTJ_00276, ABTJ_01220, ABTJ_03349, ABTJ_00758, ABTJ_00275, ABTJ_02615, ABTJ_01710, ABTJ_01447, ABTJ_00199, ABTJ_03034, ABTJ_00438, ABTJ_03359, ABTJ_02996, ABTJ_03324, ABTJ_00328, ABTJ_02848, ABTJ_01046, ABTJ_01709, ABTJ_03172, ABTJ_03125, ABTJ_00081, ABTJ_03829, ABTJ_02822, ABTJ_02072, ABTJ_02327, ABTJ_01930, ABTJ_02481, ABTJ_02308, ABTJ_01573, ABTJ_00242, ABTJ_03452, ABTJ_03712, ABTJ_03035, ABTJ_03119, ABTJ_01813, ABTJ_00590, ABTJ_00252, ABTJ_03168, ABTJ_03301, ABTJ_00371, ABTJ_00222, ABTJ_03174, ABTJ_02522, and ABTJ_02797, further preferably ABTJ_02823, ABTJ_01043, ABTJ_01220, ABTJ_03349, ABTJ_00758, ABTJ_02615, ABTJ_01710, ABTJ_01447, ABTJ_00199, ABTJ_03034, ABTJ_00438, ABTJ_03359, ABTJ_02996, ABTJ_03324, ABTJ_00328, ABTJ_02848, ABTJ_01046, ABTJ_01709, ABTJ_03172, ABTJ_03125, ABTJ_00081, ABTJ_03829, ABTJ_02822, ABTJ_02072, ABTJ_02327, ABTJ_01930, ABTJ_02481, ABTJ_02308, ABTJ_01573, ABTJ_00242, ABTJ_03452, ABTJ_03712, ABTJ_03035, ABTJ_03119, ABTJ_01813, ABTJ_00590, ABTJ_00252, ABTJ_03168, ABTJ_03301, ABTJ_00371, ABTJ_00222, ABTJ_03174, ABTJ_02522, and ABTJ_02797, is determined.

[0099] For the said antibiotics, the p-values are that low for these genes that a statistically significant determination of antibiotic susceptibility is possible in particular.

[0100] According to certain embodiments of the first and/or second aspect of the invention, determining the nucleic acid sequence information or the presence of a mutation comprises determining the presence of a single nucleotide at a single position in a gene. Thus the invention comprises methods wherein the presence of a single nucleotide polymorphism or mutation at a single nucleotide position is detected.

[0101] According to certain embodiments, the antibiotic drug in the methods of the present invention is selected from the group consisting of Amoxicillin/K Clavulanate (AUG), Ampicillin (AM), Aztreonam (AZT), Cefazolin (CFZ), Cefepime (CPE), Cefotaxime (CFT), Ceftazidime (CAZ), Ceftriaxone (CAX), Cefuroxime (CRM), Cephalotin (CF), Ciprofloxacin (CP), Ertapenem (ETP), Gentamicin (GM), Imipenem (IMP), Levofloxacin (LVX), Meropenem (MER), Piperacillin/Tazobactam (P/T), Ampicillin/Sulbactam (A/S), Tetracycline (TE), Tobramycin (TO), and Trimethoprim/Sulfamethoxazole (T/S).

[0102] The inventors have surprisingly found that mutations in certain genes are indicative not only for a resistance to one single antimicrobial, e.g. antibiotic, drug, but to groups containing several drugs.

[0103] For specific antimicrobial drugs, e.g. antibiotics, specific positions in the above genes can be determined where a high statistical significance is observed. The inventors found that, apart from the above genes indicative of a resistance against antibiotics, also single nucleotide polymorphisms (=SNP's) may have a high significance for the presence of a resistance against defined antibiotic drugs. The analysis of these polymorphisms on a nucleotide level may further improve and accelerate the determination of a drug resistance to antimicrobial drugs, e.g. antibiotics, in Acinetobacter.

[0104] According to certain embodiments of the first and/or second aspect of the invention, the gene is from Table 1 or Table 2, the antibiotic drug is selected from sulfonamide, fluoroquinolone, lactam, aminoglycoside and/or polyketide antibiotics, preferably tetracycline antibiotics, and/or benzene-derived antibiotics, and a mutation in at least one of the following nucleotide positions is detected with regard to reference genome NC_017847: 884837, 3727017, 2887795, 1071328, 291053, 1276055, 3455306, 777725, 2895753, 3425049, 289027, 2710849, 1757128, 1510433, 221638, 3110710, 447957, 3462897, 3068809, 3428448, 348383, 2919827, 1073537, 1755741, 3266655, 3218006, 88925, 3957911, 2887043, 2149065, 2407421, 1999549, 2572909, 2386045, 1620109, 257457, 3568404, 3834404, 3111752, 3212013, 1874583, 598913, 264905, 3261347, 3408240, 391624, 243000, 3268640, 2606811, 2859889, 3425108, 3425135, 3425138, 2710850, 348344, 348328, 348305, 88928, 1073545, 88943, 1755406, 2920142, 1073556, 3212079, 3212082, 3212085, 3112778, 2920152, e.g. 2887795, 1071328, 291053, 1276055, 3455306, 777725, 289027, 2710849, 1757128, 1510433, 221638, 3110710, 447957, 3462897, 3068809, 3428448, 348383, 2919827, 1073537, 1755741, 3266655, 3218006, 88925, 3957911, 2887043, 2149065, 2407421, 1999549, 2572909, 2386045, 1620109, 257457, 3568404, 3834404, 3111752, 3212013, 1874583, 598913, 264905, 3261347, 3408240, 391624, 243000, 3268640, 2606811, 2859889, 3425108, 3425135, 3425138, 2710850, 348344, 348328, 348305, 88928, 1073545, 88943, 1755406, 2920142, 1073556, 3212079, 3212082, 3212085, 3112778, 2920152, e.g. 2887795, 1071328, 1276055, 3455306, 777725, 2710849, 1757128, 1510433, 221638, 3110710, 447957, 3462897, 3068809, 3428448, 348383, 2919827, 1073537, 1755741, 3266655, 3218006, 88925, 3957911, 2887043, 2149065, 2407421, 1999549, 2572909, 2386045, 1620109, 257457, 3568404, 3834404, 3111752, 3212013, 1874583, 598913, 264905, 3261347, 3408240, 391624, 243000, 3268640, 2606811, 2859889, 3425108, 3425135, 3425138, 2710850, 348344, 348328, 348305, 88928, 1073545, 88943, 1755406, 2920142, 1073556, 3212079, 3212082, 3212085, 3112778, 2920152, particularly 884837, 3727017, 2887795, 1071328, 291053, 1276055, 3455306, 777725, 2895753, 3425049, 289027, 2710849, 1757128, 1510433, 221638, 3110710, 447957, 3462897, 3068809, 3428448, 348383, 2919827, 1073537, 1755741, 3266655, 3218006, 88925, 3957911, 2887043, 2149065, 2407421, 1999549, 2572909, 2386045, 1620109, 257457, 3568404, 3834404, 3111752, 3212013, 1874583, 598913, 264905, 3261347, 3408240, 391624, 243000, 3268640, 2606811, 2859889, further particularly 2887795, 1071328, 291053, 1276055, 3455306, 777725, 289027, 2710849, 1757128, 1510433, 221638, 3110710, 447957, 3462897, 3068809, 3428448, 348383, 2919827, 1073537, 1755741, 3266655, 3218006, 88925, 3957911, 2887043, 2149065, 2407421, 1999549, 2572909, 2386045, 1620109, 257457, 3568404, 3834404, 3111752, 3212013, 1874583, 598913, 264905, 3261347, 3408240, 391624, 243000, 3268640, 2606811, 2859889, further particularly 2887795, 1071328, 1276055, 3455306, 777725, 2710849, 1757128, 1510433, 221638, 3110710, 447957, 3462897, 3068809, 3428448, 348383, 2919827, 1073537, 1755741, 3266655, 3218006, 88925, 3957911, 2887043, 2149065, 2407421, 1999549, 2572909, 2386045, 1620109, 257457, 3568404, 3834404, 3111752, 3212013, 1874583, 598913, 264905, 3261347, 3408240, 391624, 243000, 3268640, 2606811, 2859889.

[0105] According to certain embodiments of the first and/or second aspect of the invention, the antibiotic drug is one or more of T/S, TE, CFT, LVX, GM, IMP, A/S, CRM, ETP, CP, CAX, AZT, P/T, CPE, AM, CAZ, TO, MER, and AUG, and a mutation in at least one of the following nucleotide positions is detected with regard to reference genome NC_017847: 884837, 3727017, 2887795, 1071328, 291053, 1276055, 3455306, 777725, 2895753, 3425049, 289027, 2710849, 1757128, 1510433, 221638, 3110710, 447957, 3462897, 3068809, 3428448, 348383, 2919827, 1073537, 1755741, 3266655, 3218006, 88925, 3957911, 2887043, 2149065, 2407421, 1999549, 2572909, 2386045, 1620109, 257457, 3568404, 3834404, 3111752, 3212013, 1874583, 598913, 264905, 3261347, 3408240, 391624, 243000, 3268640, 2606811, 2859889, 3425108, 3425135, 3425138, 2710850, 348344, 348328, 348305, 88928, 1073545, 88943, 1755406, 2920142, 1073556, 3212079, 3212082, 3212085, 3112778, 2920152, e.g. 2887795, 1071328, 291053, 1276055, 3455306, 777725, 289027, 2710849, 1757128, 1510433, 221638, 3110710, 447957, 3462897, 3068809, 3428448, 348383, 2919827, 1073537, 1755741, 3266655, 3218006, 88925, 3957911, 2887043, 2149065, 2407421, 1999549, 2572909, 2386045, 1620109, 257457, 3568404, 3834404, 3111752, 3212013, 1874583, 598913, 264905, 3261347, 3408240, 391624, 243000, 3268640, 2606811, 2859889, 3425108, 3425135, 3425138, 2710850, 348344, 348328, 348305, 88928, 1073545, 88943, 1755406, 2920142, 1073556, 3212079, 3212082, 3212085, 3112778, 2920152, e.g. 2887795, 1071328, 1276055, 3455306, 777725, 2710849, 1757128, 1510433, 221638, 3110710, 447957, 3462897, 3068809, 3428448, 348383, 2919827, 1073537, 1755741, 3266655, 3218006, 88925, 3957911, 2887043, 2149065, 2407421, 1999549, 2572909, 2386045, 1620109, 257457, 3568404, 3834404, 3111752, 3212013, 1874583, 598913, 264905, 3261347, 3408240, 391624, 243000, 3268640, 2606811, 2859889, 3425108, 3425135, 3425138, 2710850, 348344, 348328, 348305, 88928, 1073545, 88943, 1755406, 2920142, 1073556, 3212079, 3212082, 3212085, 3112778, 2920152, particularly 884837, 3727017, 2887795, 1071328, 291053, 1276055, 3455306, 777725, 2895753, 3425049, 289027, 2710849, 1757128, 1510433, 221638, 3110710, 447957, 3462897, 3068809, 3428448, 348383, 2919827, 1073537, 1755741, 3266655, 3218006, 88925, 3957911, 2887043, 2149065, 2407421, 1999549, 2572909, 2386045, 1620109, 257457, 3568404, 3834404, 3111752, 3212013, 1874583, 598913, 264905, 3261347, 3408240, 391624, 243000, 3268640, 2606811, 2859889, further particularly 2887795, 1071328, 291053, 1276055, 3455306, 777725, 289027, 2710849, 1757128, 1510433, 221638, 3110710, 447957, 3462897, 3068809, 3428448, 348383, 2919827, 1073537, 1755741, 3266655, 3218006, 88925, 3957911, 2887043, 2149065, 2407421, 1999549, 2572909, 2386045, 1620109, 257457, 3568404, 3834404, 3111752, 3212013, 1874583, 598913, 264905, 3261347, 3408240, 391624, 243000, 3268640, 2606811, 2859889, further particularly 2887795, 1071328, 1276055, 3455306, 777725, 2710849, 1757128, 1510433, 221638, 3110710, 447957, 3462897, 3068809, 3428448, 348383, 2919827, 1073537, 1755741, 3266655, 3218006, 88925, 3957911, 2887043, 2149065, 2407421, 1999549, 2572909, 2386045, 1620109, 257457, 3568404, 3834404, 3111752, 3212013, 1874583, 598913, 264905, 3261347, 3408240, 391624, 243000, 3268640, 2606811, 2859889.

[0106] According to certain embodiments of the first and/or second aspect of the invention, the resistance of a bacterial microorganism belonging to the species Acinetobacter against 1, 2, 3, 4, 5, 6, 7, 8, 9, 10, 11, 12, 13, 14, 15 or 16, 17, 18, 19, 20 or 21 antibiotic drugs is determined.

[0107] According to certain embodiments of the first and/or second aspect of the invention, a detected mutation is a mutation leading to an altered amino acid sequence in a polypeptide derived from a respective gene in which the detected mutation is located. According to this aspect, the detected mutation thus leads to a truncated version of the polypeptide (wherein a new stop codon is created by the mutation) or a mutated version of the polypeptide having an amino acid exchange at the respective position.

[0108] According to certain embodiments of the first and/or second aspect of the invention, determining the nucleic acid sequence information or the presence of a mutation comprises determining a partial sequence or an entire sequence of the at least two genes.

[0109] According to certain embodiments of the first and/or second aspect of the invention, determining the nucleic acid sequence information or the presence of a mutation comprises determining a partial or entire sequence of the genome of the Acinetobacter species, wherein said partial or entire sequence of the genome comprises at least a partial sequence of said at least two genes.

[0110] According to certain embodiments of the first and/or second aspect of the invention, determining the nucleic acid sequence information or the presence of a mutation comprises using a next generation sequencing or high throughput sequencing method. According to preferred embodiments of the first and/or second aspect of the invention, a partial or entire genome sequence of the bacterial organism of Acinetobacter species is determined by using a next generation sequencing or high throughput sequencing method.

[0111] In a further, third aspect, the present invention relates to a method of determining an antimicrobial drug, e.g. antibiotic, resistance profile for bacterial microorganisms of Acinetobacter species, comprising:

obtaining or providing a first data set of gene sequences of a plurality of clinical isolates of Acinetobacter species;
providing a second data set of antimicrobial drug, e.g. antibiotic, resistance of the plurality of clinical isolates of Acinetobacter species;
aligning the gene sequences of the first data set to at least one, preferably one, reference genome of Acinetobacter, and/or assembling the gene sequence of the first data set, at least in part;
analyzing the gene sequences of the first data set for genetic variants to obtain a third data set of genetic variants;
correlating the third data set with the second data set and statistically analyzing the correlation; and
determining the genetic sites in the genome of Acinetobacter associated with antimicrobial drug, e.g. antibiotic, resistance.

[0112] The different steps can be carried out as described with regard to the method of the first aspect of the present invention.

[0113] When referring to the second data set, wherein the second data set e.g. comprises, respectively is, a set of antimicrobial drug, e.g. antibiotic, resistances of a plurality of clinical isolates, this can, within the scope of the invention, also refer to a self-learning data base that, whenever a new sample is analyzed, can take this sample into the second data set and thus expand its data base. The second data set thus does not have to be static and can be expanded, either by external input or by incorporating new data due to self-learning. This is, however, not restricted to the third aspect of the invention, but applies to other aspects of the invention that refer to a second data set, which does not necessarily have to refer to antimicrobial drug resistance. The same applies, where applicable, to the first data set, e.g. in the third aspect.

[0114] According to certain embodiments, statistical analysis in the present methods is carried out using Fisher's test with p<10⁻⁶, preferably p<10⁻¹⁰, more preferably p<10⁻²⁰, further more preferably p<10⁻³⁰, particularly p<10⁻⁴⁰.

[0115] The method of the third aspect of the present invention, as well as related methods, e.g. according to the 7^{th} and 10^{th} aspect, can, according to certain embodiments, comprise correlating different genetic sites to each other, e.g. in at least two, three, four, five, six, seven, eight, nine or ten genes. This way even higher statistical significance can be achieved.

[0116] According to certain embodiments of the method of the third aspect and related methods—as above, the second data set is provided by culturing the clinical isolates of Acinetobacter species on agar plates provided with antimicrobial drugs, e.g. antibiotics, at different concentrations and the second data is obtained by taking the minimal concentration of the plates that inhibits growth of the respective Acinetobacter species.

[0117] According to certain embodiments of the method of the third aspect and related methods, the antibiotic is at least one selected from the group of β-lactams, β-lactam inhibitors, quinolines and derivatives thereof, aminoglycosides, tetracyclines, and folate synthesis inhibitors, preferably Amoxicillin/K Clavulanate, Ampicillin, Aztreonam, Cefazolin, Cefepime, Cefotaxime, Ceftazidime, Ceftriaxone, Cefuroxime, Cephalothin, Ciprofloxacin, Ertapenem, Gentamicin, Imipenem, Levofloxacin, Meropenem, Piperacillin/Tazobactam, Ampicillin/Sulbactam, Tetracycline, Tobramycin, and Trimethoprim/Sulfamethoxazole.

[0118] According to certain embodiments of the method of the third aspect and related methods, the gene sequences in the third data set are comprised in at least one gene from the group of genes consisting of ABTJ_00846, ABTJ_03609, ABTJ_02823, ABTJ_01043, ABTJ_00276, ABTJ_01220, ABTJ_03349, ABTJ_00758, ABTJ_02830, ABTJ_03319, ABTJ_00275, ABTJ_02615, ABTJ_01710, ABTJ_01447, ABTJ_00199, ABTJ_03034, ABTJ_00438, ABTJ_03359, ABTJ_02996, ABTJ_03324, ABTJ_00328, ABTJ_02848, ABTJ_01046, ABTJ_01709, ABTJ_03172, ABTJ_03125, ABTJ_00081, ABTJ_03829, ABTJ_02822, ABTJ_02072, ABTJ_02327, ABTJ_01930, ABTJ_02481, ABTJ_02308, ABTJ_01573, ABTJ_00242, ABTJ_03452, ABTJ_03712, ABTJ_03035, ABTJ_03119, ABTJ_01813, ABTJ_00590, ABTJ_00252, ABTJ_03168, ABTJ_03301, ABTJ_00371, ABTJ_00222, ABTJ_03174, ABTJ_02522, and ABTJ_02797, preferably ABTJ_02823, ABTJ_01043, ABTJ_00276, ABTJ_01220, ABTJ_03349, ABTJ_00758, ABTJ_00275, ABTJ_02615, ABTJ_01710, ABTJ_01447, ABTJ_00199, ABTJ_03034, ABTJ_00438, ABTJ_03359, ABTJ_02996, ABTJ_03324, ABTJ_00328, ABTJ_02848, ABTJ_01046, ABTJ_01709, ABTJ_03172, ABTJ_03125, ABTJ_00081, ABTJ_03829, ABTJ_02822, ABTJ_02072, ABTJ_02327, ABTJ_01930, ABTJ_02481, ABTJ_02308, ABTJ_01573, ABTJ_00242, ABTJ_03452, ABTJ_03712, ABTJ_03035, ABTJ_03119, ABTJ_01813, ABTJ_00590, ABTJ_00252, ABTJ_03168, ABTJ_03301, ABTJ_00371, ABTJ_00222, ABTJ_03174, ABTJ_02522, and ABTJ_02797, further preferably ABTJ_02823, ABTJ_01043, ABTJ_01220, ABTJ_03349, ABTJ_00758, ABTJ_02615, ABTJ_01710, ABTJ_01447, ABTJ_00199, ABTJ_03034, ABTJ_00438, ABTJ_03359, ABTJ_02996, ABTJ_03324, ABTJ_00328, ABTJ_02848, ABTJ_01046, ABTJ_01709, ABTJ_03172, ABTJ_03125, ABTJ_00081, ABTJ_03829, ABTJ_02822, ABTJ_02072, ABTJ_02327, ABTJ_01930, ABTJ_02481, ABTJ_02308, ABTJ_01573, ABTJ_00242, ABTJ_03452, ABTJ_03712, ABTJ_03035, ABTJ_03119, ABTJ_01813, ABTJ_00590, ABTJ_00252, ABTJ_03168, ABTJ_03301, ABTJ_00371, ABTJ_00222, ABTJ_03174, ABTJ_02522, and ABTJ_02797.

[0119] According to certain embodiments of the method of the third aspect and related methods, the genetic variant has a point mutation, an insertion and or deletion of up to four bases, and/or a frameshift mutation.

[0120] A fourth aspect of the present invention relates to a method of determining an antimicrobial drug, e.g. antibiotic, resistance profile for a bacterial microorganism belonging to the species Acinetobacter comprising the steps of

a) obtaining or providing a sample containing or suspected of containing the bacterial microorganism;
b) determining the presence of a mutation in at least one gene of the bacterial microorganism as determined by the method of the third aspect of the invention;
wherein the presence of a mutation is indicative of a resistance to an antimicrobial drug, e.g. antibiotic, drug.

[0121] Steps a) and b) can herein be carried out as described with regard to the first aspect, as well as for the following aspects of the invention.

[0122] With this method, any mutations in the genome of Acinetobacter species correlated with antimicrobial drug, e.g. antibiotic, resistance can be determined and a thorough antimicrobial drug, e.g. antibiotic, resistance profile can be established.

[0123] A simple read out concept for a diagnostic test as described in this aspect is shown schematically in FIG. 1.

[0124] According to FIG. 1, a sample 1, e.g. blood from a patient, is used for molecular testing 2, e.g. using next generation sequencing (NGS), and then a molecular fingerprint 3 is taken, e.g. in case of NGS a sequence of selected genomic/plasmid regions or the whole genome is assembled. This is then compared to a reference library 4, i.e. selected sequences or the whole sequence are/is compared to one or more reference sequences, and mutations (SNPs, sequence-gene additions/deletions, etc.) are correlated with susceptibility/reference profile of reference strains in the reference library. The reference library 4 herein contains many genomes and is different from a reference genome. Then the result 5 is reported comprising ID (pathogen identification), i.e. a list of all (pathogenic) species identified in the sample, and AST (antimicrobial susceptibility testing), i.e. a list including a susceptibility/resistance profile for all species listed

[0125] A fifth aspect of the present invention relates to a diagnostic method of determining an infection of a patient with Acinetobacter species potentially resistant to antimicrobial drug treatment, which also can be described as method of determining an antimicrobial drug, e.g. antibiotic, resistant Acinetobacter infection in a patient, comprising the steps of:

a) obtaining or providing a sample containing or suspected of containing a bacterial microorganism belonging to the species Acinetobacter from the patient;
b) determining the presence of at least one mutation in at least one gene of the bacterial microorganism belonging to the species Acinetobacter as determined by the method of the third aspect of the present invention, wherein the presence of said at least one mutation is indicative of an antimicrobial drug, e.g. antibiotic, resistant Acinetobacter infection in said patient.

[0126] Again, steps a) and b) can herein be carried out as described with regard to the first aspect of the present invention.

[0127] According to this aspect, an Acinetobacter infection in a patient can be determined using sequencing methods as well as a resistance to antimicrobial drugs, e.g. antibiotics, of the Acinetobacter species be determined in a short amount of time compared to the conventional methods.

[0128] In a sixth aspect the present invention relates to a method of selecting a treatment of a patient suffering from an infection with a potentially resistant Acinetobacter strain, e.g. an antimicrobial drug, e.g. antibiotic, resistant Acinetobacter infection, comprising the steps of:

a) obtaining or providing a sample containing or suspected of containing a bacterial microorganism belonging to the species Acinetobacter from the patient;
b) determining the presence of at least one mutation in at least one gene of the bacterial microorganism belonging to the species Acinetobacter as determined by the method of the third aspect of the invention, wherein the presence of said at least one mutation is indicative of a resistance to one or more antimicrobial, e.g. antibiotic, drugs;
c) identifying said at least one or more antimicrobial, e.g. antibiotic, drugs; and
d) selecting one or more antimicrobial, e.g. antibiotic, drugs different from the ones identified in step c) and being suitable for the treatment of an Acinetobacter infection.

[0129] This method can be carried out similarly to the second aspect of the invention and enables a fast was to select a suitable treatment with antibiotics for any infection with an unknown Acinetobacter species.

[0130] A seventh aspect of the present invention relates to a method of acquiring, respectively determining, an antimicrobial drug, e.g. antibiotic, resistance profile for a bacterial microorganism of Acinetobacter species, comprising:

obtaining or providing a first data set of gene sequences of a clinical isolate of Acinetobacter species;
providing a second data set of antimicrobial drug, e.g. antibiotic, resistance of a plurality of clinical isolates of Acinetobacter species;
aligning the gene sequences of the first data set to at least one, preferably one, reference genome of Acinetobacter, and/or assembling the gene sequence of the first data set, at least in part;
analyzing the gene sequences of the first data set for genetic variants to obtain a third data set of genetic variants of the first data set;
correlating the third data set with the second data set and statistically analyzing the correlation; and
determining the genetic sites in the genome of Acinetobacter of the first data set associated with antimicrobial drug, e.g. antibiotic, resistance.

[0131] With this method, antimicrobial drug, e.g. antibiotic, resistances in an unknown isolate of Acinetobacter can be determined.

[0132] According to certain embodiments, the reference genome of Acinetobacter is NC_017847 as annotated at the NCBI. According to certain embodiments, statistical analysis in the present methods is carried out using Fisher's test with p<10⁻⁶, preferably p<10⁻¹⁰, more preferably p<further more preferably p<10⁻³⁰, particularly p<10⁻⁴⁰. Also, according to certain embodiments, the method further comprises correlating different genetic sites to each other, e.g. in at least two, three, four, five, six, seven, eight, nine or ten genes.

[0133] An eighth aspect of the present invention relates to a computer program product comprising computer executable instructions which, when executed, perform a method according to the third, fourth, fifth, sixth or seventh aspect of the present invention.

[0134] In certain embodiments the computer program product is one on which program commands or program codes of a computer program for executing said method are stored. According to certain embodiments the computer program product is a storage medium. The same applies to the computer program products of the aspects mentioned afterwards, i.e. the eleventh aspect of the present invention. As noted above, the computer program products of the present invention can be self-learning, e.g. with respect to the first and second data sets.

[0135] In order to obtain the best possible information from the highly complex genetic data and develop an optimum model for diagnostic and therapeutical uses as well as the methods of the present invention—which can be applied stably in clinical routine—a thorough in silico analysis can be necessary. The proposed principle is based on a combination of different approaches, e.g. alignment with at least one, preferably more reference genomes and/or assembly of the genome and correlation of mutations found in every sample, e.g. from each patient, with all references and drugs, e.g. antibiotics, and search for mutations which occur in several drug and several strains.

[0136] Using the above steps a list of mutations as well of genes is generated. These can be stored in databases and statistical models can be derived from the databases. The statistical models can be based on at least one or more mutations at least one or more genes. Statistical models that can be trained can be combined from mutations and genes. Examples of algorithms that can produce such models are association Rules, Support Vector Machines, Decision Trees, Decision Forests, Discriminant-Analysis, Cluster-Methods, and many more.

[0137] The goal of the training is to allow a reproducible, standardized application during routine procedures.

[0138] For this, for example, a genome or parts of the genome of a microorganism can be sequenced from a patient to be diagnosed. Afterwards, core characteristics can be derived from the sequence data which can be used to predict resistance. These are the points in the database used for the final model, i.e. at least one mutation or at least one gene, but also combinations of mutations, etc.

[0139] The corresponding characteristics can be used as input for the statistical model and thus enable a prognosis for new patients. Not only the information regarding all resistances of all microorganisms, e.g. of Acinetobacter species, against all drugs, e.g. antibiotics, can be integrated in a computer decision support tool, but also corresponding directives (e.g. EUCAST) so that only treatment proposals are made that are in line with the directives.

[0140] A ninth aspect of the present invention relates to the use of the computer program product according to the eighth aspect for acquiring an antimicrobial drug, e.g. antibiotic, resistance profile for bacterial microorganisms of Acinetobacter species or in a method of the third aspect of the invention.

[0141] In a tenth aspect, a method of selecting a treatment of a patient having an infection with a bacterial microorganism of Acinetobacter species, comprising:

obtaining or providing a first data set comprising a gene sequence of at least one clinical isolate of the bacterial microorganism from the patient;
providing a second data set of antimicrobial drug, e.g. antibiotic, resistance of a plurality of clinical isolates of the bacterial microorganism;
aligning the gene sequences of the first data set to at least one, preferably one, reference genome of the bacterial microorganism, and/or assembling the gene sequence of the first data set, at least in part;
analyzing the gene sequences of the first data set for genetic variants to obtain a third data set of genetic variants of the first data set;
correlating the third data set with the second data set of antimicrobial drug, e.g. antibiotic, resistance of a plurality of clinical isolates of the bacterial microorganism and statistically analyzing the correlation;
determining the genetic sites in the genome of the clinical isolate of the bacterial microorganism of the first data set associated with antimicrobial drug, e.g. antibiotic, resistance; and
selecting a treatment of the patient with one or more antimicrobial, e.g. antibiotic, drugs different from the ones identified in the determination of the genetic sites associated with antimicrobial drug, e.g. antibiotic, resistance is disclosed.

[0142] Again, the steps can be carried out as similar steps before. In this method, as well as similar ones, no aligning is necessary, as the unknown sample can be directly correlated, after the genome or genome sequences are produced, with the second data set and thus mutations and antimicrobial drug, e.g. antibiotic, resistances can be determined. The first data set can be assembled, for example, using known techniques.

[0143] According to certain embodiments, statistical analysis in the present method is carried out using Fisher's test with p<10⁻⁶, preferably p<10⁻¹⁰, more preferably p<10⁻²⁰, further more preferably p<10⁻³⁰, particularly p<10⁻⁴⁰. Also, according to certain embodiments, the method further comprises correlating different genetic sites to each other.

[0144] An eleventh aspect of the present invention is directed to a computer program product comprising computer executable instructions which, when executed, perform a method according to the tenth aspect.

[0145] A twelfth aspect of the present invention is directed to a diagnostic method of determining an infection of a patient with Acinetobacter species potentially resistant to antimicrobial drug treatment, which can also be described as method of determining an antimicrobial drug, e.g. antibiotic, resistant Acinetobacter infection of a patient, comprising the steps of:

a) obtaining or providing a sample containing or suspected of containing at least one Acinetobacter species from the patient;
b) determining the presence of at least one mutation in at least one gene from the group of genes consisting of ABTJ_00846, ABTJ_03609, ABTJ_02823, ABTJ_01043, ABTJ_00276, ABTJ_01220, ABTJ_03349, ABTJ_00758, ABTJ_02830, ABTJ_03319, ABTJ_00275, ABTJ_02615, ABTJ_01710, ABTJ_01447, ABTJ_00199, ABTJ_03034, ABTJ_00438, ABTJ_03359, ABTJ_02996, ABTJ_03324, ABTJ_00328, ABTJ_02848, ABTJ_01046, ABTJ_01709, ABTJ_03172, ABTJ_03125, ABTJ_00081, ABTJ_03829, ABTJ_02822, ABTJ_02072, ABTJ_02327, ABTJ_01930, ABTJ_02481, ABTJ_02308, ABTJ_01573, ABTJ_00242, ABTJ_03452, ABTJ_03712, ABTJ_03035, ABTJ_03119, ABTJ_01813, ABTJ_00590, ABTJ_00252, ABTJ_03168, ABTJ_03301, ABTJ_00371, ABTJ_00222, ABTJ_03174, ABTJ_02522, and ABTJ_02797, wherein the presence of said at least one mutation is indicative of an antimicrobial drug, e.g. antibiotic, resistant Acinetobacter infection in said patient.

[0146] A thirteenth aspect of the present invention is directed to a method of selecting a treatment of a patient suffering from an antimicrobial drug, e.g. antibiotic, resistant Acinetobacter infection, comprising the steps of:

a) obtaining or providing a sample containing or suspected of containing at least one Acinetobacter species from the patient;
b) determining the presence of at least one mutation in at least one gene from the group of genes consisting of ABTJ_00846, ABTJ_03609, ABTJ_02823, ABTJ_01043, ABTJ_00276, ABTJ_01220, ABTJ_03349, ABTJ_00758, ABTJ_02830, ABTJ_03319, ABTJ_00275, ABTJ_02615, ABTJ_01710, ABTJ_01447, ABTJ_00199, ABTJ_03034, ABTJ_00438, ABTJ_03359, ABTJ_02996, ABTJ_03324, ABTJ_00328, ABTJ_02848, ABTJ_01046, ABTJ_01709, ABTJ_03172, ABTJ_03125, ABTJ_00081, ABTJ_03829, ABTJ_02822, ABTJ_02072, ABTJ_02327, ABTJ_01930, ABTJ_02481, ABTJ_02308, ABTJ_01573, ABTJ_00242, ABTJ_03452, ABTJ_03712, ABTJ_03035, ABTJ_03119, ABTJ_01813, ABTJ_00590, ABTJ_00252, ABTJ_03168, ABTJ_03301, ABTJ_00371, ABTJ_00222, ABTJ_03174, ABTJ_02522, and ABTJ_02797, preferably ABTJ_02823, ABTJ_01043, ABTJ_00276, ABTJ_01220, ABTJ_03349, ABTJ_00758, ABTJ_00275, ABTJ_02615, ABTJ_01710, ABTJ_01447, ABTJ_00199, ABTJ_03034, ABTJ_00438, ABTJ_03359, ABTJ_02996, ABTJ_03324, ABTJ_00328, ABTJ_02848, ABTJ_01046, ABTJ_01709, ABTJ_03172, ABTJ_03125, ABTJ_00081, ABTJ_03829, ABTJ_02822, ABTJ_02072, ABTJ_02327, ABTJ_01930, ABTJ_02481, ABTJ_02308, ABTJ_01573, ABTJ_00242, ABTJ_03452, ABTJ_03712, ABTJ_03035, ABTJ_03119, ABTJ_01813, ABTJ_00590, ABTJ_00252, ABTJ_03168, ABTJ_03301, ABTJ_00371, ABTJ_00222, ABTJ_03174, ABTJ_02522, and ABTJ_02797, further preferably ABTJ_02823, ABTJ_01043, ABTJ_01220, ABTJ_03349, ABTJ_00758, ABTJ_02615, ABTJ_01710, ABTJ_01447, ABTJ_00199, ABTJ_03034, ABTJ_00438, ABTJ_03359, ABTJ_02996, ABTJ_03324, ABTJ_00328, ABTJ_02848, ABTJ_01046, ABTJ_01709, ABTJ_03172, ABTJ_03125, ABTJ_00081, ABTJ_03829, ABTJ_02822, ABTJ_02072, ABTJ_02327, ABTJ_01930, ABTJ_02481, ABTJ_02308, ABTJ_01573, ABTJ_00242, ABTJ_03452, ABTJ_03712, ABTJ_03035, ABTJ_03119, ABTJ_01813, ABTJ_00590, ABTJ_00252, ABTJ_03168, ABTJ_03301, ABTJ_00371, ABTJ_00222, ABTJ_03174, ABTJ_02522, and ABTJ_02797, wherein the presence of said at least one mutation is indicative of a resistance to one or more antimicrobial, e.g. antibiotic, drugs;
c) identifying said at least one or more antimicrobial, e.g. antibiotic, drugs; and
d) selecting one or more antimicrobial, e.g. antibiotic, drugs different from the ones identified in step c) and being suitable for the treatment of an Acinetobacter infection.

[0147] Again, in the twelfth and the thirteenth aspect the steps correspond to those in the first or second aspect, although only a mutation in at least one gene is determined.

[0148] A fourteenth aspect of the present invention is directed to a method of treating a patient suffering from an antimicrobial drug, e.g. antibiotic, resistant Acinetobacter infection, comprising the steps of:

a) obtaining or providing a sample containing or suspected of containing at least one Acinetobacter species from the patient;
b) determining the presence of at least one mutation in at least one gene from the group of genes consisting of ABTJ_00846, ABTJ_03609, ABTJ_02823, ABTJ_01043, ABTJ_00276, ABTJ_01220, ABTJ_03349, ABTJ_00758, ABTJ_02830, ABTJ_03319, ABTJ_00275, ABTJ_02615, ABTJ_01710, ABTJ_01447, ABTJ_00199, ABTJ_03034, ABTJ_00438, ABTJ_03359, ABTJ_02996, ABTJ_03324, ABTJ_00328, ABTJ_02848, ABTJ_01046, ABTJ_01709, ABTJ_03172, ABTJ_03125, ABTJ_00081, ABTJ_03829, ABTJ_02822, ABTJ_02072, ABTJ_02327, ABTJ_01930, ABTJ_02481, ABTJ_02308, ABTJ_01573, ABTJ_00242, ABTJ_03452, ABTJ_03712, ABTJ_03035, ABTJ_03119, ABTJ_01813, ABTJ_00590, ABTJ_00252, ABTJ_03168, ABTJ_03301, ABTJ_00371, ABTJ_00222, ABTJ_03174, ABTJ_02522, and ABTJ_02797, preferably ABTJ_02823, ABTJ_01043, ABTJ_00276, ABTJ_01220, ABTJ_03349, ABTJ_00758, ABTJ_00275, ABTJ_02615, ABTJ_01710, ABTJ_01447, ABTJ_00199, ABTJ_03034, ABTJ_00438, ABTJ_03359, ABTJ_02996, ABTJ_03324, ABTJ_00328, ABTJ_02848, ABTJ_01046, ABTJ_01709, ABTJ_03172, ABTJ_03125, ABTJ_00081, ABTJ_03829, ABTJ_02822, ABTJ_02072, ABTJ_02327, ABTJ_01930, ABTJ_02481, ABTJ_02308, ABTJ_01573, ABTJ_00242, ABTJ_03452, ABTJ_03712, ABTJ_03035, ABTJ_03119, ABTJ_01813, ABTJ_00590, ABTJ_00252, ABTJ_03168, ABTJ_03301, ABTJ_00371, ABTJ_00222, ABTJ_03174, ABTJ_02522, and ABTJ_02797, further preferably ABTJ_02823, ABTJ_01043, ABTJ_01220, ABTJ_03349, ABTJ_00758, ABTJ_02615, ABTJ_01710, ABTJ_01447, ABTJ_00199, ABTJ_03034, ABTJ_00438, ABTJ_03359, ABTJ_02996, ABTJ_03324, ABTJ_00328, ABTJ_02848, ABTJ_01046, ABTJ_01709, ABTJ_03172, ABTJ_03125, ABTJ_00081, ABTJ_03829, ABTJ_02822, ABTJ_02072, ABTJ_02327, ABTJ_01930, ABTJ_02481, ABTJ_02308, ABTJ_01573, ABTJ_00242, ABTJ_03452, ABTJ_03712, ABTJ_03035, ABTJ_03119, ABTJ_01813, ABTJ_00590, ABTJ_00252, ABTJ_03168, ABTJ_03301, ABTJ_00371, ABTJ_00222, ABTJ_03174, ABTJ_02522, and ABTJ_02797, wherein the presence of said at least one mutation is indicative of a resistance to one or more antimicrobial, e.g. antibiotic, drugs;
c) identifying said at least one or more antimicrobial, e.g. antibiotic, drugs;
d) selecting one or more antimicrobial, e.g. antibiotic, drugs different from the ones identified in step c) and being suitable for the treatment of a Acinetobacter infection; and
e) treating the patient with said one or more antimicrobial, e.g. antibiotic, drugs.

[0149] A fifteenth aspect of the present invention is directed to a method of treating a patient suffering from an antimicrobial drug, e.g. antibiotic, resistant Acinetobacter infection, comprising the steps of:

a) obtaining or providing a sample containing or suspected of containing at least one Acinetobacter species from the patient;

[0150] b) determining the presence of at least one mutation in at least two genes from the group of genes consisting of ABTJ_00846, ABTJ_03609, ABTJ_02823, ABTJ_01043, ABTJ_00276, ABTJ_01220, ABTJ_03349, ABTJ_00758, ABTJ_02830, ABTJ_03319, ABTJ_00275, ABTJ_02615, ABTJ_01710, ABTJ_01447, ABTJ_00199, ABTJ_03034, ABTJ_00438, ABTJ_03359, ABTJ_02996, ABTJ_03324, ABTJ_00328, ABTJ_02848, ABTJ_01046, ABTJ_01709, ABTJ_03172, ABTJ_03125, ABTJ_00081, ABTJ_03829, ABTJ_02822, ABTJ_02072, ABTJ_02327, ABTJ_01930, ABTJ_02481, ABTJ_02308, ABTJ_01573, ABTJ_00242, ABTJ_03452, ABTJ_03712, ABTJ_03035, ABTJ_03119, ABTJ_01813, ABTJ_00590, ABTJ_00252, ABTJ_03168, ABTJ_03301, ABTJ_00371, ABTJ_00222, ABTJ_03174, ABTJ_02522, and ABTJ_02797, preferably ABTJ_02823, ABTJ_01043, ABTJ_00276, ABTJ_01220, ABTJ_03349, ABTJ_00758, ABTJ_00275, ABTJ_02615, ABTJ_01710, ABTJ_01447, ABTJ_00199, ABTJ_03034, ABTJ_00438, ABTJ_03359, ABTJ_02996, ABTJ_03324, ABTJ_00328, ABTJ_02848, ABTJ_01046, ABTJ_01709, ABTJ_03172, ABTJ_03125, ABTJ_00081, ABTJ_03829, ABTJ_02822, ABTJ_02072, ABTJ_02327, ABTJ_01930, ABTJ_02481, ABTJ_02308, ABTJ_01573, ABTJ_00242, ABTJ_03452, ABTJ_03712, ABTJ_03035, ABTJ_03119, ABTJ_01813, ABTJ_00590, ABTJ_00252, ABTJ_03168, ABTJ_03301, ABTJ_00371, ABTJ_00222, ABTJ_03174, ABTJ_02522, and ABTJ_02797, further preferably ABTJ_02823, ABTJ_01043, ABTJ_01220, ABTJ_03349, ABTJ_00758, ABTJ_02615, ABTJ_01710, ABTJ_01447, ABTJ_00199, ABTJ_03034, ABTJ_00438, ABTJ_03359, ABTJ_02996, ABTJ_03324, ABTJ_00328, ABTJ_02848, ABTJ_01046, ABTJ_01709, ABTJ_03172, ABTJ_03125, ABTJ_00081, ABTJ_03829, ABTJ_02822, ABTJ_02072, ABTJ_02327, ABTJ_01930, ABTJ_02481, ABTJ_02308, ABTJ_01573, ABTJ_00242, ABTJ_03452, ABTJ_03712, ABTJ_03035, ABTJ_03119, ABTJ_01813, ABTJ_00590, ABTJ_00252, ABTJ_03168, ABTJ_03301, ABTJ_00371, ABTJ_00222, ABTJ_03174, ABTJ_02522, and ABTJ_02797, wherein the presence of said at least two mutations is indicative of a resistance to one or more antimicrobial, e.g. antibiotic, drugs;

c) identifying said at least one or more antimicrobial, e.g. antibiotic, drugs;
d) selecting one or more antimicrobial, e.g. antibiotic, drugs different from the ones identified in step c) and being suitable for the treatment of a Acinetobacter infection; and
e) treating the patient with said one or more antimicrobial, e.g. antibiotic, drugs.

[0151] Also in the fourteenth and fifteenth aspect of the invention, steps a) to d) are analogous to the steps in the method of the second aspect of the present invention. Step e) can be sufficiently carried out without being restricted and can be done e.g. non-invasively.

### EXAMPLES

[0152] The present invention will now be described in detail with reference to several examples thereof. However, these examples are illustrative and do not limit the scope of the invention.

### Example 1

[0153] Whole genome sequencing was carried out in addition to classical antimicrobial susceptibility testing of the same isolates for a cohort of 448 specimens. This allowed performing genome wide correlation studies to find genetic variants (e.g. point mutations, small insertions and deletion, larger structural variants, plasmid copy number gains, gene dosage effects) in the genome and plasmids that are significantly correlated to the resistance against one or several drugs. The approach also allows for comparing the relevant sites in the genome to each other.

[0154] In the approach the different sources of genetic resistance as well as the different ways of how bacteria can become resistant were covered. By measuring clinical isolates collected in a broad geographical area and across a broad time span of three decades a complete picture going far beyond the rather artificial step of laboratory generated resistance mechanisms was tried to be generated.

[0155] To this end, a set of 21 clinically relevant antimicrobial agents with 5 different modes of action was put together, and the minimally inhibitory concentration (MIC) of the 21 drugs for the Acinetobacter isolates was measured.

[0156] The detailed procedure is given in the following:

### Bacterial Strains

[0157] The inventors selected 448 Acinetobacter strains from the microbiology strain collection at Siemens Healthcare Diagnostics (West Sacramento, Calif.) for susceptibility testing and whole genome sequencing.

[0158] Antimicrobial Susceptibility Testing (AST) Panels Frozen reference AST panels were prepared following Clinical Laboratory Standards Institute (CLSI) recommendations. The following antimicrobial agents (with μg/ml concentrations shown in parentheses) were included in the panels: Amoxicillin/K Clavulanate (0.5/0.25-64/32), Ampicillin (0.25-128), Ampicillin/Sulbactam (0.5/0.25-64/32), Aztreonam (0.25-64), Cefazolin (0.5-32), Cefepime (0.25-64), Cefotaxime (0.25-128), Ceftazidime (0.25-64), Ceftriaxone (0.25-128), Cefuroxime (1-64), Cephalothin (1-64), Ciprofloxacin (0.015-8), Ertapenem (0.12-32), Gentamicin (0.12-32), Imipenem (0.25-32), Levofloxacin (0.25-16), Meropenem (0.12-32), Piperacillin/Tazobactam (0.25/4-256/4), Tetracycline (0.5-64), Tobramycin (0.12-32), and Trimethoprim/Sulfamethoxazole (0.25/4.7-32/608). Prior to use with clinical isolates, AST panels were tested with QC strains. AST panels were considered acceptable for testing with clinical isolates when the QC results met QC ranges described by CLSI16.

### Inoculum Preparation

[0159] Isolates were cultured on trypticase soy agar with 5% sheep blood (BBL, Cockeysville, Md.) and incubated in ambient air at 35±1° C. for 18-24 h. Isolated colonies (4-5 large colonies or 5-10 small colonies) were transferred to a 3 ml Sterile Inoculum Water (Siemens) and emulsified to a final turbidity of a 0.5 McFarland standard. 2 ml of this suspension was added to 25 ml Inoculum Water with Pluronic-F (Siemens). Using the Inoculator (Siemens) specific for frozen AST panels, 5 μl of the cell suspension was transferred to each well of the AST panel. The inoculated AST panels were incubated in ambient air at 35±1° C. for 16-20 h. Panel results were read visually, and minimal inhibitory concentrations (MIC) were determined.

### DNA Extraction

[0160] Four streaks of each Gram-negative bacterial isolate cultured on trypticase soy agar containing 5% sheep blood and cell suspensions were made in sterile 1.5 ml collection tubes containing 50 μl Nuclease-Free Water (AM9930, Life Technologies). Bacterial isolate samples were stored at −20° C. until nucleic acid extraction. The Tissue Preparation System (TPS) (096D0382-02_01_B, Siemens) and the VERSANT® Tissue Preparation Reagents (TPR) kit (10632404B, Siemens) were used to extract DNA from these bacterial isolates. Prior to extraction, the bacterial isolates were thawed at room temperature and were pelleted at 2000 G for 5 seconds. The DNA extraction protocol DNAext was used for complete total nucleic acid extraction of 48 isolate samples and eluates, 50 μl each, in 4 hours. The total nucleic acid eluates were then transferred into 96-Well qPCR Detection Plates (401341, Agilent Technologies) for RNase A digestion, DNA quantitation, and plate DNA concentration standardization processes. RNase A (AM2271, Life Technologies) which was diluted in nuclease-free water following manufacturer's instructions was added to 50 μl of the total nucleic acid eluate for a final working concentration of 20 μg/ml. Digestion enzyme and eluate mixture were incubated at 37° C. for 30 minutes using Siemens VERSANT® Amplification and Detection instrument. DNA from the RNase digested eluate was quantitated using the Quant-iT™ PicoGreen dsDNA Assay (P11496, Life Technologies) following the assay kit instruction, and fluorescence was determined on the Siemens VERSANT® Amplification and Detection instrument. Data analysis was performed using Microsoft® Excel 2007. 25 μl of the quantitated DNA eluates were transferred into a new 96-Well PCR plate for plate DNA concentration standardization prior to library preparation. Elution buffer from the TPR kit was used to adjust DNA concentration. The standardized DNA eluate plate was then stored at −80° C. until library preparation.

### Next Generation Sequencing

[0161] Prior to library preparation, quality control of isolated bacterial DNA was conducted using a Qubit 2.0 Fluorometer (Qubit dsDNA BR Assay Kit, Life Technologies) and an Agilent 2200 TapeStation (Genomic DNA ScreenTape, Agilent Technologies). NGS libraries were prepared in 96 well format using NexteraXT DNA Sample Preparation Kit and NexteraXT Index Kit for 96 Indexes (Illumina) according to the manufacturer's protocol. The resulting sequencing libraries were quantified in a qPCR-based approach using the KAPA SYBR FAST qPCR MasterMix Kit (Peqlab) on a ViiA 7 real time PCR system (Life Technologies). 96 samples were pooled per lane for paired-end sequencing (2×100 bp) on Illumina Hiseq2000 or Hiseq2500 sequencers using TruSeq PE Cluster v3 and TruSeq SBS v3 sequencing chemistry (Illumina). Basic sequencing quality parameters were determined using the FastQC quality control tool for high throughput sequence data (Babraham Bioinformatics Institute).

### Data Analysis

[0162] Raw paired-end sequencing data for the 448 Acinetobacter samples were mapped against the Acinetobacter reference (NC_017847) with BWA 0.6.1.20. The resulting SAM files were sorted, converted to BAM files, and PCR duplicates were marked using the Picard tools package 1.104 (http://picard.sourceforge.net/). The Genome Analysis Toolkit 3.1.1 (GATK)21 was used to call SNPs and indels for blocks of 200 Acinetobacter samples (parameters: -ploidy 1 -glm BOTH -stand call conf 30 -stand emit conf 10). VCF files were combined into a single file and quality filtering for SNPs was carried out (QD<2.0 ∥ FS>60.0 ∥ MQ<40.0) and indels (QD<2.0 ∥ FS>200.0). Detected variants were annotated with SnpEff22 to predict coding effects. For each annotated position, genotypes of all Acinetobacter samples were considered. Acinetobacter samples were split into two groups, low resistance group (having lower MIC concentration for the considered drug), and high resistance group (having higher MIC concentrations) with respect to a certain MIC concentration (breakpoint). To find the best breakpoint all thresholds were evaluated and p-values were computed with Fisher's exact test relying on a 2×2 contingency table (number of Acinetobacter samples having the reference or variant genotype vs. number of samples belonging to the low and high resistance group). The best computed breakpoint was the threshold yielding the lowest p-value for a certain genomic position and drug. For further analyses positions with non-synonymous alterations and p-value <10⁻⁹ were considered.

[0163] Since a potential reason for drug resistance is gene duplication, gene dose dependency was evaluated. For each sample the genomic coverage for each position was determined using BED Tools. Gene ranges were extracted from the reference assembly NC_017847.gff and the normalized median coverage per gene was calculated. To compare low- and high-resistance isolates the best area under the curve (AUC) value was computed. Groups of at least 20% of all samples having a median coverage larger than zero for that gene and containing more than 15 samples per group were considered in order to exclude artifacts and cases with AUC >0.75 were further evaluated.

[0164] To include data on the different ways how resistance mechanisms are acquired Acinetobacter isolates collected over more than three decades were analyzed such that also horizontal gene transfer could potentially be discovered.

[0165] In detail, the following steps were carried out: Acinetobacter strains to be tested were seeded on agar plates and incubated under growth conditions for 24 hours. Then, colonies were picked and incubated in growth medium in the presence of a given antibiotic drug in dilution series under growth conditions for 16-20 hours. Bacterial growth was determined by observing turbidity.

[0166] Next mutations were searched that are highly correlated with the results of the phenotypic resistance test.

[0167] For sequencing, samples were prepared using a Nextera library preparation, followed by multiplexed sequencing using the Illuminat HiSeq 2500 system, paired end sequencing. Data were mapped with BWA (Li H. and Durbin R. (2010) Fast and accurate long-read alignment with Burrows-Wheeler Transform. Bioinformatics, Epub. [PMID: 20080505]) and SNP were called using samtools (Li H.*, Handsaker B.*, Wysoker A., Fennell T., Ruan J., Homer N., Marth G., Abecasis G., Durbin R. and 1000 Genome Project Data Processing Subgroup (2009) The Sequence alignment/map (SAM) format and SAMtools. Bioinformatics, 25, 2078-9. [PMID: 19505943]).

[0168] As reference genome, NC_017847 as annotated at the NCBI was determined as best suited.

[0169] The mutations were matched to the genes and the amino acid changes were calculated. Using different algorithms (SVM, homology modeling) mutations leading to amino acid changes with likely pathogenicity/resistance were calculated.

[0170] In total, whole genomes and plasmids of 448 different clinical isolates of Acinetobacter species, particularly Acinetobacter baumanii, were sequenced, and classical antimicrobial susceptibility testing (AST) against 21 therapy forms as described above was performed for all organisms. From the classical AST a table with 448 rows (isolates) and 21 columns (MIC values for 21 drugs) was obtained. Each table entry contained the MIC for the respective isolate and the respective drug. The genetic data were mapped to different reference genomes of Acinetobacter that have been annotated at the NCBI (http://www.ncbi.nlm.nih.gov/), and the best reference was chosen as template for the alignment—NC_017847 as annotated at the NCBI. Additionally, assemblies were carried out and it was verified that the sequenced genomes fulfil all quality criteria to become reference genomes.

[0171] Next, genetic variants were evaluated. This approach resulted in a table with the genetic sites in columns and the same isolates in 448 rows. Each table entry contained the genetic determinant at the respective site (A, C, T, G, small insertions and deletions, . . . ) for the respective isolate.

[0172] In a next step different statistical tests were carried out
[0173] 1) For comparing resistance/susceptibility to genetic sites, contingency tables were calculated and the significance was determined using Fishers test
[0174] 2) For comparing different sites to each other the correlation between different genetic sites was calculated
[0175] 3) For detecting gene dosage effects, e.g. loss or gain of genes (in the genome or on plasmids) the coverage (i.e. how many read map to the current position) at each site for resistant and not resistant isolates was calculated.

[0176] From the data, first the 50 genes with the best p-value were chosen for the list of mutations as well as the list of correlated antibiotic resistance, representing Tables 1 and 2.

[0177] A full list of all genetic sites, drugs, drug classes, affected genes etc. is provided in Tables 3 and 4a, 4b, 4c and 4d, wherein Table 3 corresponds to Table 1 and represents the genes having the lowest p-values after determining mutations in the genes, and Table 4, respectively Tables 4a, 4b, 4c and 4d correspond to Table 2 and represent the genes having the lowest p-values after correlating the mutations with antibiotic resistance for the respective antibiotics.

TABLE 3
Detailed results for the genes in Example 1 (corresponding to Table 1)

| | | #drug | | | genbank protein |
|---|---|---|---|---|---|
| POS | drug class | classes | p-value | gene name | accession number |
| 884837 | other (benzene derived)/sulfonamide;polyketide*; | 5 | 5.5144E−115 | ABTJ_00846 | YP_006288764.1 |
| | fluoroquinolone;Lactams;aminoglycoside | | | | |
| 3727017 | other (benzene derived)/sulfonamide;polyketide*; | 5 | 7.58233E−62 | ABTJ_03609 | YP_006291461.1 |
| | fluoroquinolone;Lactams;aminoglycoside | | | | |
| 2887795 | other (benzene derived)/sulfonamide;polyketide*; | 5 | 1.1364E−56 | ABTJ_02823 | YP_006290709.1 |
| | fluoroquinolone;Lactams;aminoglycoside | | | | |
| 1071328 | other (benzene derived)/sulfonamide;polyketide*; | 5 | 1.01762E−55 | ABTJ_01043 | YP_006288960.1 |
| | fluoroquinolone;Lactams;aminoglycoside | | | | |
| 291053 | other (benzene derived)/sulfonamide;polyketide*; | 5 | 1.47802E−53 | ABTJ_00276 | YP_006288235.1 |
| | fluoroquinolone;Lactams;aminoglycoside | | | | |
| 1276055 | other (benzene derived)/sulfonamide;polyketide*; | 5 | 8.25909E−53 | ABTJ_01220 | YP_006289132.1 |
| | fluoroquinolone;Lactams;aminoglycoside | | | | |
| 3455306 | other (benzene derived)/sulfonamide;polyketide*; | 5 | 5.07927E−52 | ABTJ_03349 | YP_006291212.1 |
| | fluoroquinolone;Lactams;aminoglycoside | | | | |
| 777725 | other (benzene derived)/sulfonamide;polyketide*; | 5 | 7.4611E−52 | ABTJ_00758 | YP_006288686.1 |
| | fluoroquinolone;Lactams;aminoglycoside | | | | |
| 2895753 | other (benzene derived)/sulfonamide;polyketide*; | 5 | 9.49807E−52 | ABTJ_02830 | YP_006290716.1 |
| | fluoroquinolone;Lactams;aminoglycoside | | | | |
| 3425049 | other (benzene derived)/sulfonamide;polyketide*; | 5 | 3.58997E−51 | ABTJ_03319 | YP_006291182.1 |
| | fluoroquinolone;Lactams;aminoglycoside | | | | |
| 289027 | other (benzene derived)/sulfonamide;polyketide*; | 5 | 5.57597E−51 | ABTJ_00275 | YP_006288234.1 |
| | fluoroquinolone;Lactams;aminoglycoside | | | | |
| 2710849 | other (benzene derived)/sulfonamide;polyketide*; | 5 | 6.34201E−51 | ABTJ_02615 | YP_006290504.1 |
| | fluoroquinolone;Lactams;aminoglycoside | | | | |
| 1757128 | other (benzene derived)/sulfonamide;polyketide*; | 5 | 2.10615E−50 | ABTJ_01710 | YP_006289610.1 |
| | fluoroquinolone;Lactams;aminoglycoside | | | | |
| 1510433 | other (benzene derived)/sulfonamide;polyketide*; | 5 | 8.27894E−50 | ABTJ_01447 | YP_006289351.1 |
| | fluoroquinolone;Lactams;aminoglycoside | | | | |
| 221638 | other (benzene derived)/sulfonamide;polyketide*; | 5 | 1.60469E−49 | ABTJ_00199 | YP_006288164.1 |
| | fluoroquinolone;Lactams;aminoglycoside | | | | |
| 3110710 | other (benzene derived)/sulfonamide;polyketide*; | 5 | 1.60469E−49 | ABTJ_03034 | YP_006290909.1 |
| | fluoroquinolone;Lactams;aminoglycoside | | | | |
| 447957 | other (benzene derived)/sulfonamide;polyketide*; | 5 | 4.31622E−49 | ABTJ_00438 | YP_006288393.1 |
| | fluoroquinolone;Lactams;aminoglycoside | | | | |
| 3462897 | other (benzene derived)/sulfonamide;polyketide*; | 5 | 6.93483E−49 | ABTJ_03359 | YP_006291222.1 |
| | fluoroquinolone;Lactams;aminoglycoside | | | | |
| 3068809 | other (benzene derived)/sulfonamide;polyketide*; | 5 | 8.09645E−49 | ABTJ_02996 | YP_006290873.1 |
| | fluoroquinolone;Lactams;aminoglycoside | | | | |
| 3428448 | other (benzene derived)/sulfonamide;polyketide*; | 5 | 2.03596E−48 | ABTJ_03324 | YP_006291187.1 |
| | fluoroquinolone;Lactams;aminoglycoside | | | | |
| 348383 | other (benzene derived)/sulfonamide;polyketide*; | 5 | 2.52076E−48 | ABTJ_00328 | YP_006288283.1 |
| | fluoroquinolone;Lactams;aminoglycoside | | | | |
| 2919827 | other (benzene derived)/sulfonamide;polyketide*; | 5 | 3.82276E−48 | ABTJ_02848 | YP_006290734.1 |
| | fluoroquinolone;Lactams;aminoglycoside | | | | |
| 1073537 | other (benzene derived)/sulfonamide;polyketide*; | 5 | 4.25625E−48 | ABTJ_01046 | YP_006288963.1 |
| | fluoroquinolone;Lactams;aminoglycoside | | | | |
| 1755741 | other (benzene derived)/sulfonamide;polyketide*; | 5 | 1.69988E−47 | ABTJ_01709 | YP_006289609.1 |
| | fluoroquinolone;Lactams;aminoglycoside | | | | |
| 3266655 | other (benzene derived)/sulfonamide;polyketide*; | 5 | 2.93721E−47 | ABTJ_03172 | YP_006291035.1 |
| | fluoroquinolone;Lactams;aminoglycoside | | | | |
| 3218006 | other (benzene derived)/sulfonamide;polyketide*; | 5 | 4.12082E−47 | ABTJ_03125 | YP_006290996.1 |
| | fluoroquinolone;Lactams;aminoglycoside | | | | |
| 88925 | other (benzene derived)/sulfonamide;polyketide*; | 5 | 6.5407E−47 | ABTJ_00081 | YP_006288046.1 |
| | fluoroquinolone;Lactams;aminoglycoside | | | | |
| 3957911 | other (benzene derived)/sulfonamide;polyketide*; | 5 | 1.00789E−46 | ABTJ_03829 | YP_006291666.1 |
| | fluoroquinolone;Lactams;aminoglycoside | | | | |
| 2887043 | other (benzene derived)/sulfonamide;polyketide*; | 5 | 1.03502E−46 | ABTJ_02822 | YP_006290708.1 |
| | fluoroquinolone;Lactams;aminoglycoside | | | | |
| 2149065 | other (benzene derived)/sulfonamide;polyketide*; | 5 | 1.74663E−46 | ABTJ_02072 | YP_006289970.1 |
| | fluoroquinolone;Lactams;aminoglycoside | | | | |
| 2407421 | other (benzene derived)/sulfonamide;polyketide*; | 5 | 2.64691E−46 | ABTJ_02327 | YP_006290220.1 |
| | fluoroquinolone;Lactams;aminoglycoside | | | | |
| 1999549 | other (benzene derived)/sulfonamide;polyketide*; | 5 | 2.69645E−46 | ABTJ_01930 | YP_006289828.1 |
| | fluoroquinolone;Lactams;aminoglycoside | | | | |
| 2572909 | other (benzene derived)/sulfonamide;polyketide*; | 5 | 4.22328E−46 | ABTJ_02481 | YP_006290373.1 |
| | fluoroquinolone;Lactams;aminoglycoside | | | | |
| 2386045 | other (benzene derived)/sulfonamide;polyketide*; | 5 | 4.64093E−46 | ABTJ_02308 | YP_006290201.1 |
| | fluoroquinolone;Lactams;aminoglycoside | | | | |
| 1620109 | other (benzene derived)/sulfonamide;polyketide*; | 5 | 9.0963E−46 | ABTJ_01573 | YP_006289477.1 |
| | fluoroquinolone;Lactams;aminoglycoside | | | | |
| 257457 | other (benzene derived)/sulfonamide;polyketide*; | 5 | 1.08314E−45 | ABTJ_00242 | YP_006288203.1 |
| | fluoroquinolone;Lactams;aminoglycoside | | | | |
| 3568404 | other (benzene derived)/sulfonamide;polyketide*; | 5 | 1.12995E−45 | ABTJ_03452 | YP_006291310.1 |
| | fluoroquinolone;Lactams;aminoglycoside | | | | |
| 3834404 | other (benzene derived)/sulfonamide;polyketide*; | 5 | 1.23824E−45 | ABTJ_03712 | YP_006291555.1 |
| | fluoroquinolone;Lactams;aminoglycoside | | | | |
| 3111752 | other (benzene derived)/sulfonamide;polyketide*; | 5 | 1.57276E−45 | ABTJ_03035 | YP_006290910.1 |
| | fluoroquinolone;Lactams;aminoglycoside | | | | |
| 3212013 | other (benzene derived)/sulfonamide;polyketide*; | 5 | 1.57276E−45 | ABTJ_03119 | YP_006290990.1 |
| | fluoroquinolone;Lactams;aminoglycoside | | | | |
| 1874583 | other (benzene derived)/sulfonamide;polyketide*; | 5 | 1.66624E−45 | ABTJ_01813 | YP_006289713.1 |
| | fluoroquinolone;Lactams;aminoglycoside | | | | |
| 598913 | other (benzene derived)/sulfonamide;polyketide*; | 5 | 1.70556E−45 | ABTJ_00590 | YP_006288527.1 |
| | fluoroquinolone;Lactams;aminoglycoside | | | | |
| 264905 | other (benzene derived)/sulfonamide;polyketide*; | 5 | 2.52673E−45 | ABTJ_00252 | YP_006288213.1 |
| | fluoroquinolone;Lactams;aminoglycoside | | | | |
| 3261347 | other (benzene derived)/sulfonamide;polyketide*; | 5 | 2.88605E−45 | ABTJ_03168 | YP_006291031.1 |
| | fluoroquinolone;Lactams;aminoglycoside | | | | |
| 3408240 | other (benzene derived)/sulfonamide;polyketide*; | 5 | 4.00289E−45 | ABTJ_03301 | YP_006291164.1 |
| | fluoroquinolone;Lactams;aminoglycoside | | | | |
| 391624 | other (benzene derived)/sulfonamide;polyketide*; | 5 | 5.50442E−45 | ABTJ_00371 | YP_006288326.1 |
| | fluoroquinolone;Lactams;aminoglycoside | | | | |
| 243000 | other (benzene derived)/sulfonamide;polyketide*; | 5 | 6.82911E−45 | ABTJ_00222 | YP_006288186.1 |
| | fluoroquinolone;Lactams;aminoglycoside | | | | |
| 3268640 | other (benzene derived)/sulfonamide;polyketide*; | 5 | 7.01381E−45 | ABTJ_03174 | YP_006291037.1 |
| | fluoroquinolone;Lactams;aminoglycoside | | | | |
| 2606811 | other (benzene derived)/sulfonamide;polyketide*; | 5 | 7.79092E−45 | ABTJ_02522 | YP_006290412.1 |
| | fluoroquinolone;Lactams;aminoglycoside | | | | |
| 2859889 | other (benzene derived)/sulfonamide;polyketide*; | 5 | 8.74949E−45 | ABTJ_02797 | YP_006290683.1 |
| | fluoroquinolone;Lactams;aminoglycoside | | | | |
| 3425108 | other (benzene derived)/sulfonamide;polyketide*; | 5 | 3.58997E−51 | ABTJ_03319 | YP_006291182.1 |
| | fluoroquinolone;Lactams;aminoglycoside | | | | |
| 3425135 | other (benzene derived)/sulfonamide;polyketide*; | 5 | 3.58997E−51 | ABTJ_03319 | YP_006291182.1 |
| | fluoroquinolone;Lactams;aminoglycoside | | | | |
| 3425138 | other (benzene derived)/sulfonamide;polyketide*; | 5 | 3.58997E−51 | ABTJ_03319 | YP_006291182.1 |
| | fluoroquinolone;Lactams;aminoglycoside | | | | |
| 2710850 | other (benzene derived)/sulfonamide;polyketide*; | 5 | 6.34201E−51 | ABTJ_02615 | YP_006290504.1 |
| | fluoroquinolone;Lactams;aminoglycoside | | | | |
| 348344 | other (benzene derived)/sulfonamide;polyketide*; | 5 | 3.16001E−48 | ABTJ_00328 | YP_006288283.1 |
| | fluoroquinolone;Lactams;aminoglycoside | | | | |
| 348328 | other (benzene derived)/sulfonamide;polyketide*; | 5 | 7.46751E−48 | ABTJ_00328 | YP_006288283.1 |
| | fluoroquinolone;Lactams;aminoglycoside | | | | |
| 348305 | other (benzene derived)/sulfonamide;polyketide*; | 5 | 1.78415E−47 | ABTJ_00328 | YP_006288283.1 |
| | fluoroquinolone;Lactams;aminoglycoside | | | | |
| 88928 | other (benzene derived)/sulfonamide;polyketide*; | 5 | 6.5407E−47 | ABTJ_00081 | YP_006288046.1 |
| | fluoroquinolone;Lactams;aminoglycoside | | | | |
| 1073545 | other (benzene derived)/sulfonamide;polyketide*; | 5 | 9.26857E−47 | ABTJ_01046 | YP_006288963.1 |
| | fluoroquinolone;Lactams;aminoglycoside | | | | |
| 88943 | other (benzene derived)/sulfonamide;polyketide*; | 5 | 1.09578E−46 | ABTJ_00081 | YP_006288046.1 |
| | fluoroquinolone;Lactams;aminoglycoside | | | | |
| 1755406 | other (benzene derived)/sulfonamide;polyketide*; | 5 | 3.64073E−46 | ABTJ_01709 | YP_006289609.1 |
| | fluoroquinolone;Lactams;aminoglycoside | | | | |
| 2920142 | other (benzene derived)/sulfonamide;polyketide*; | 5 | 4.51808E−46 | ABTJ_02848 | YP_006290734.1 |
| | fluoroquinolone;Lactams;aminoglycoside | | | | |
| 1073556 | other (benzene derived)/sulfonamide;polyketide*; | 5 | 1.45321E−45 | ABTJ_01046 | YP_006288963.1 |
| | fluoroquinolone;Lactams;aminoglycoside | | | | |
| 3212079 | other (benzene derived)/sulfonamide;polyketide*; | 5 | 1.57276E−45 | ABTJ_03119 | YP_006290990.1 |
| | fluoroquinolone;Lactams;aminoglycoside | | | | |
| 3212082 | other (benzene derived)/sulfonamide;polyketide*; | 5 | 1.57276E−45 | ABTJ_03119 | YP_006290990.1 |
| | fluoroquinolone;Lactams;aminoglycoside | | | | |
| 3212085 | other (benzene derived)/sulfonamide;polyketide*; | 5 | 1.57276E−45 | ABTJ_03119 | YP_006290990.1 |
| | fluoroquinolone;Lactams;aminoglycoside | | | | |
| 3112778 | other (benzene derived)/sulfonamide;polyketide*; | 5 | 1.97339E−45 | ABTJ_03035 | YP_006290910.1 |
| | fluoroquinolone;Lactams;aminoglycoside | | | | |
| 2920152 | other (benzene derived)/sulfonamide;polyketide*; | 5 | 2.33812E−45 | ABTJ_02848 | YP_006290734.1 |
| | fluoroquinolone;Lactams;aminoglycoside | | | | |

*: (tetracycline)

TABLE 4a
Detailed results for the genes in Example 1 (corresponding to Table 2)

| POS | drug | #drugs |
|---|---|---|
| 884837 | T/S; TE; CFT; LVX; GM; IMP; A/S; CRM; ETP; CP; CAX; AZT; P/T; CPE; AM; CAZ; TO; MER; AUG | 19 |
| 3727017 | T/S; TE; CFT; LVX; GM; IMP; A/S; CRM; ETP; CP; CAX; AZT; P/T; CPE; AM; CAZ; TO; MER; AUG | 19 |
| 2887795 | T/S; TE; CFT; LVX; GM; IMP; A/S; CRM; ETP; CP; CAX; AZT; P/T; CPE; AM; CAZ; TO; MER; AUG | 19 |
| 1071328 | T/S; TE; CFT; LVX; GM; IMP; A/S; CRM; ETP; CP; CAX; AZT; P/T; CPE; AM; CAZ; TO; MER; AUG | 19 |
| 291053 | T/S; TE; CFT; LVX; GM; IMP; A/S; CRM; ETP; CP; CAX; AZT; P/T; CPE; AM; CAZ; TO; MER; AUG | 19 |
| 1276055 | T/S; TE; CFT; LVX; GM; IMP; A/S; CRM; ETP; CP; CAX; AZT; P/T; CPE; AM; CAZ; TO; MER; AUG | 19 |
| 3455306 | T/S; TE; CFT; LVX; GM; IMP; A/S; CRM; ETP; CP; CAX; AZT; P/T; CPE; AM; CAZ; TO; MER; AUG | 19 |
| 777725 | T/S; TE; CFT; LVX; GM; IMP; A/S; CRM; ETP; CP; CAX; AZT; P/T; CPE; AM; CAZ; TO; MER; AUG | 19 |
| 2895753 | T/S; TE; CFT; LVX; GM; IMP; A/S; CRM; ETP; CP; CAX; AZT; P/T; CPE; AM; CAZ; TO; MER; AUG | 19 |
| 3425049 | T/S; TE; CFT; LVX; GM; IMP; A/S; CRM; ETP; CP; CAX; AZT; P/T; CPE; AM; CAZ; TO; MER; AUG | 19 |
| 289027 | T/S; TE; CFT; LVX; GM; IMP; A/S; CRM; ETP; CP; CAX; AZT; P/T; CPE; AM; CAZ; TO; MER; AUG | 19 |
| 2710849 | T/S; TE; CFT; LVX; GM; IMP; A/S; CRM; ETP; CP; CAX; AZT; P/T; CPE; AM; CAZ; TO; MER; AUG | 19 |
| 1757128 | T/S; TE; CFT; LVX; GM; IMP; A/S; CRM; ETP; CP; CAX; AZT; P/T; CPE; AM; CAZ; TO; MER; AUG | 19 |
| 1510433 | T/S; TE; CFT; LVX; GM; IMP; A/S; CRM; ETP; CP; CAX; AZT; P/T; CPE; AM; CAZ; TO; MER; AUG | 19 |
| 221638 | T/S; TE; CFT; LVX; GM; IMP; A/S; CRM; ETP; CP; CAX; AZT; P/T; CPE; AM; CAZ; TO; MER; AUG | 19 |
| 3110710 | T/S; TE; CFT; LVX; GM; IMP; A/S; CRM; ETP; CP; CAX; AZT; P/T; CPE; AM; CAZ; TO; MER; AUG | 19 |
| 447957 | T/S; TE; CFT; LVX; GM; IMP; A/S; CRM; ETP; CP; CAX; AZT; P/T; CPE; AM; CAZ; TO; MER; AUG | 19 |
| 3462897 | T/S; TE; CFT; LVX; GM; IMP; A/S; CRM; ETP; CP; CAX; AZT; P/T; CPE; AM; CAZ; TO; MER; AUG | 19 |
| 3068809 | T/S; TE; CFT; LVX; GM; IMP; A/S; CRM; ETP; CP; CAX; AZT; P/T; CPE; AM; CAZ; TO; MER; AUG | 19 |
| 3428448 | T/S; TE; CFT; LVX; GM; IMP; A/S; CRM; ETP; CP; CAX; AZT; P/T; CPE; AM; CAZ; TO; MER; AUG | 19 |
| 348383 | T/S; TE; CFT; LVX; GM; IMP; A/S; CRM; ETP; CP; CAX; AZT; P/T; CPE; AM; CAZ; TO; MER; AUG | 19 |
| 2919827 | T/S; TE; CFT; LVX; GM; IMP; A/S; CRM; ETP; CP; CAX; AZT; P/T; CPE; AM; CAZ; TO; MER; AUG | 19 |
| 1073537 | T/S; TE; CFT; LVX; GM; IMP; A/S; CRM; ETP; CP; CAX; AZT; P/T; CPE; AM; CAZ; TO; MER; AUG | 19 |
| 1755741 | T/S; TE; CFT; LVX; GM; IMP; A/S; CRM; ETP; CP; CAX; AZT; P/T; CPE; AM; CAZ; TO; MER; AUG | 19 |
| 3266655 | T/S; TE; CFT; LVX; GM; IMP; A/S; CRM; ETP; CP; CAX; AZT; P/T; CPE; AM; CAZ; TO; MER; AUG | 19 |
| 3218006 | T/S; TE; CFT; LVX; GM; IMP; A/S; CRM; ETP; CP; CAX; AZT; P/T; CPE; AM; CAZ; TO; MER; AUG | 19 |
| 88925 | T/S; TE; CFT; LVX; GM; IMP; A/S; CRM; ETP; CP; CAX; AZT; P/T; CPE; AM; CAZ; TO; MER; AUG | 19 |
| 3957911 | T/S; TE; CFT; LVX; GM; IMP; A/S; CRM; ETP; CP; CAX; AZT; P/T; CPE; AM; CAZ; TO; MER; AUG | 19 |
| 2887043 | T/S; TE; CFT; LVX; GM; IMP; A/S; CRM; ETP; CP; CAX; AZT; P/T; CPE; AM; CAZ; TO; MER; AUG | 19 |
| 2149065 | T/S; TE; CFT; LVX; GM; IMP; A/S; CRM; ETP; CP; CAX; AZT; P/T; CPE; AM; CAZ; TO; MER; AUG | 19 |
| 2407421 | T/S; TE; CFT; LVX; GM; IMP; A/S; CRM; ETP; CP; CAX; AZT; P/T; CPE; AM; CAZ; TO; MER; AUG | 19 |
| 1999549 | T/S; TE; CFT; LVX; GM; IMP; A/S; CRM; ETP; CP; CAX; AZT; P/T; CPE; AM; CAZ; TO; MER; AUG | 19 |
| 2572909 | T/S; TE; CFT; LVX; GM; IMP; A/S; CRM; ETP; CP; CAX; AZT; P/T; CPE; AM; CAZ; TO; MER; AUG | 19 |
| 2386045 | T/S; TE; CFT; LVX; GM; IMP; A/S; CRM; ETP; CP; CAX; AZT; P/T; CPE; AM; CAZ; TO; MER; AUG | 19 |
| 1620109 | T/S; TE; CFT; LVX; GM; IMP; A/S; CRM; ETP; CP; CAX; AZT; P/T; CPE; AM; CAZ; TO; MER; AUG | 19 |
| 257457 | T/S; TE; CFT; LVX; GM; IMP; A/S; CRM; ETP; CP; CAX; AZT; P/T; CPE; AM; CAZ; TO; MER; AUG | 19 |
| 3568404 | T/S; TE; CFT; LVX; GM; IMP; A/S; CRM; ETP; CP; CAX; AZT; P/T; CPE; AM; CAZ; TO; MER; AUG | 19 |
| 3834404 | T/S; TE; CFT; LVX; GM; IMP; A/S; CRM; ETP; CP; CAX; AZT; P/T; CPE; AM; CAZ; TO; MER; AUG | 19 |
| 3111752 | T/S; TE; CFT; LVX; GM; IMP; A/S; CRM; ETP; CP; CAX; AZT; P/T; CPE; AM; CAZ; TO; MER; AUG | 19 |
| 3212013 | T/S; TE; CFT; LVX; GM; IMP; A/S; CRM; ETP; CP; CAX; AZT; P/T; CPE; AM; CAZ; TO; MER; AUG | 19 |
| 1874583 | T/S; TE; CFT; LVX; GM; IMP; A/S; CRM; ETP; CP; CAX; AZT; P/T; CPE; AM; CAZ; TO; MER; AUG | 19 |
| 598913 | T/S; TE; CFT; LVX; GM; IMP; A/S; CRM; ETP; CP; CAX; AZT; P/T; CPE; AM; CAZ; TO; MER; AUG | 19 |
| 264905 | T/S; TE; CFT; LVX; GM; IMP; A/S; CRM; ETP; CP; CAX; AZT; P/T; CPE; AM; CAZ; TO; MER; AUG | 19 |
| 3261347 | T/S; TE; CFT; LVX; GM; IMP; A/S; CRM; ETP; CP; CAX; AZT; P/T; CPE; AM; CAZ; TO; MER; AUG | 19 |
| 3408240 | T/S; TE; CFT; LVX; GM; IMP; A/S; CRM; ETP; CP; CAX; AZT; P/T; CPE; AM; CAZ; TO; MER; AUG | 19 |
| 391624 | T/S; TE; CFT; LVX; GM; IMP; A/S; CRM; ETP; CP; CAX; AZT; P/T; CPE; AM; CAZ; TO; MER; AUG | 19 |
| 243000 | T/S; TE; CFT; LVX; GM; IMP; A/S; CRM; ETP; CP; CAX; AZT; P/T; CPE; AM; CAZ; TO; MER; AUG | 19 |
| 3268640 | T/S; TE; CFT; LVX; GM; IMP; A/S; CRM; ETP; CP; CAX; AZT; P/T; CPE; AM; CAZ; TO; MER; AUG | 19 |
| 2606811 | T/S; TE; CFT; LVX; GM; IMP; A/S; CRM; ETP; CP; CAX; AZT; P/T; CPE; AM; CAZ; TO; MER; AUG | 19 |
| 2859889 | T/S; TE; CFT; LVX; GM; IMP; A/S; CRM; ETP; CP; CAX; AZT; P/T; CPE; AM; CAZ; TO; MER; AUG | 19 |
| 3425108 | T/S; TE; CFT; LVX; GM; IMP; A/S; CRM; ETP; CP; CAX; AZT; P/T; CPE; AM; CAZ; TO; MER; AUG | 19 |
| 3425135 | T/S; TE; CFT; LVX; GM; IMP; A/S; CRM; ETP; CP; CAX; AZT; P/T; CPE; AM; CAZ; TO; MER; AUG | 19 |
| 3425138 | T/S; TE; CFT; LVX; GM; IMP; A/S; CRM; ETP; CP; CAX; AZT; P/T; CPE; AM; CAZ; TO; MER; AUG | 19 |
| 2710850 | T/S; TE; CFT; LVX; GM; IMP; A/S; CRM; ETP; CP; CAX; AZT; P/T; CPE; AM; CAZ; TO; MER; AUG | 19 |
| 348344 | T/S; TE; CFT; LVX; GM; IMP; A/S; CRM; ETP; CP; CAX; AZT; P/T; CPE; AM; CAZ; TO; MER; AUG | 19 |
| 348328 | T/S; TE; CFT; LVX; GM; IMP; A/S; CRM; ETP; CP; CAX; AZT; P/T; CPE; AM; CAZ; TO; MER; AUG | 19 |
| 348305 | T/S; TE; CFT; LVX; GM; IMP; A/S; CRM; ETP; CP; CAX; AZT; P/T; CPE; AM; CAZ; TO; MER; AUG | 19 |
| 88928 | T/S; TE; CFT; LVX; GM; IMP; A/S; CRM; ETP; CP; CAX; AZT; P/T; CPE; AM; CAZ; TO; MER; AUG | 19 |
| 1073545 | T/S; TE; CFT; LVX; GM; IMP; A/S; CRM; ETP; CP; CAX; AZT; P/T; CPE; AM; CAZ; TO; MER; AUG | 19 |
| 88943 | T/S; TE; CFT; LVX; GM; IMP; A/S; CRM; ETP; CP; CAX; AZT; P/T; CPE; AM; CAZ; TO; MER; AUG | 19 |
| 1755406 | T/S; TE; CFT; LVX; GM; IMP; A/S; CRM; ETP; CP; CAX; AZT; P/T; CPE; AM; CAZ; TO; MER; AUG | 19 |
| 2920142 | T/S; TE; CFT; LVX; GM; IMP; A/S; CRM; ETP; CP; CAX; AZT; P/T; CPE; AM; CAZ; TO; MER; AUG | 19 |
| 1073556 | T/S; TE; CFT; LVX; GM; IMP; A/S; CRM; ETP; CP; CAX; AZT; P/T; CPE; AM; CAZ; TO; MER; AUG | 19 |
| 3212079 | T/S; TE; CFT; LVX; GM; IMP; A/S; CRM; ETP; CP; CAX; AZT; P/T; CPE; AM; CAZ; TO; MER; AUG | 19 |
| 3212082 | T/S; TE; CFT; LVX; GM; IMP; A/S; CRM; ETP; CP; CAX; AZT; P/T; CPE; AM; CAZ; TO; MER; AUG | 19 |
| 3212085 | T/S; TE; CFT; LVX; GM; IMP; A/S; CRM; ETP; CP; CAX; AZT; P/T; CPE; AM; CAZ; TO; MER; AUG | 19 |
| 3112778 | T/S; TE; CFT; LVX; GM; IMP; A/S; CRM; ETP; CP; CAX; AZT; P/T; CPE; AM; CAZ; TO; MER; AUG | 19 |
| 2920152 | T/S; TE; CFT; LVX; GM; IMP; A/S; CRM; ETP; CP; CAX; AZT; P/T; CPE; AM; CAZ; TO; MER; AUG | 19 |

TABLE 4b
Detailed results for the genes in Example
1 (corresponding to Table 2, continued)

| | | #drug |
|---|---|---|
| POS | drug class | classes |
| 884837 | other (benzene derived)/sulfonamide; polyketide*; | 5 |
| | fluoroquinolone; Lactams; aminoglycoside | |
| 3727017 | other (benzene derived)/sulfonamide; polyketide*; | 5 |
| | fluoroquinolone; Lactams; aminoglycoside | |
| 2887795 | other (benzene derived)/sulfonamide; polyketide*; | 5 |
| | fluoroquinolone; Lactams; aminoglycoside | |
| 1071328 | other (benzene derived)/sulfonamide; polyketide*; | 5 |
| | fluoroquinolone; Lactams; aminoglycoside | |
| 291053 | other (benzene derived)/sulfonamide; polyketide*; | 5 |
| | fluoroquinolone; Lactams; aminoglycoside | |
| 1276055 | other (benzene derived)/sulfonamide; polyketide*; | 5 |
| | fluoroquinolone; Lactams; aminoglycoside | |
| 3455306 | other (benzene derived)/sulfonamide; polyketide*; | 5 |
| | fluoroquinolone; Lactams; aminoglycoside | |
| 777725 | other (benzene derived)/sulfonamide; polyketide*; | 5 |
| | fluoroquinolone; Lactams; aminoglycoside | |
| 2895753 | other (benzene derived)/sulfonamide; polyketide*; | 5 |
| | fluoroquinolone; Lactams; aminoglycoside | |
| 3425049 | other (benzene derived)/sulfonamide; polyketide*; | 5 |
| | fluoroquinolone; Lactams; aminoglycoside | |
| 289027 | other (benzene derived)/sulfonamide; polyketide*; | 5 |
| | fluoroquinolone; Lactams; aminoglycoside | |
| 2710849 | other (benzene derived)/sulfonamide; polyketide*; | 5 |
| | fluoroquinolone; Lactams; aminoglycoside | |
| 1757128 | other (benzene derived)/sulfonamide; polyketide*; | 5 |
| | fluoroquinolone; Lactams; aminoglycoside | |
| 1510433 | other (benzene derived)/sulfonamide; polyketide*; | 5 |
| | fluoroquinolone; Lactams; aminoglycoside | |
| 221638 | other (benzene derived)/sulfonamide; polyketide*; | 5 |
| | fluoroquinolone; Lactams; aminoglycoside | |
| 3110710 | other (benzene derived)/sulfonamide; polyketide*; | 5 |
| | fluoroquinolone; Lactams; aminoglycoside | |
| 447957 | other (benzene derived)/sulfonamide; polyketide*; | 5 |
| | fluoroquinolone; Lactams; aminoglycoside | |
| 3462897 | other (benzene derived)/sulfonamide; polyketide*; | 5 |
| | fluoroquinolone; Lactams; aminoglycoside | |
| 3068809 | other (benzene derived)/sulfonamide; polyketide*; | 5 |
| | fluoroquinolone; Lactams; aminoglycoside | |
| 3428448 | other (benzene derived)/sulfonamide; polyketide*; | 5 |
| | fluoroquinolone; Lactams; aminoglycoside | |
| 348383 | other (benzene derived)/sulfonamide; polyketide*; | 5 |
| | fluoroquinolone; Lactams; aminoglycoside | |
| 2919827 | other (benzene derived)/sulfonamide; polyketide*; | 5 |
| | fluoroquinolone; Lactams; aminoglycoside | |
| 1073537 | other (benzene derived)/sulfonamide; polyketide*; | 5 |
| | fluoroquinolone; Lactams; aminoglycoside | |
| 1755741 | other (benzene derived)/sulfonamide; polyketide*; | 5 |
| | fluoroquinolone; Lactams; aminoglycoside | |
| 3266655 | other (benzene derived)/sulfonamide; polyketide*; | 5 |
| | fluoroquinolone; Lactams; aminoglycoside | |
| 3218006 | other (benzene derived)/sulfonamide; polyketide*; | 5 |
| | fluoroquinolone; Lactams; aminoglycoside | |
| 88925 | other (benzene derived)/sulfonamide; polyketide*; | 5 |
| | fluoroquinolone; Lactams; aminoglycoside | |
| 3957911 | other (benzene derived)/sulfonamide; polyketide*; | 5 |
| | fluoroquinolone; Lactams; aminoglycoside | |
| 2887043 | other (benzene derived)/sulfonamide; polyketide*; | 5 |
| | fluoroquinolone; Lactams; aminoglycoside | |
| 2149065 | other (benzene derived)/sulfonamide; polyketide*; | 5 |
| | fluoroquinolone; Lactams; aminoglycoside | |
| 2407421 | other (benzene derived)/sulfonamide; polyketide*; | 5 |
| | fluoroquinolone; Lactams; aminoglycoside | |
| 1999549 | other (benzene derived)/sulfonamide; polyketide*; | 5 |
| | fluoroquinolone; Lactams; aminoglycoside | |
| 2572909 | other (benzene derived)/sulfonamide; polyketide*; | 5 |
| | fluoroquinolone; Lactams; aminoglycoside | |
| 2386045 | other (benzene derived)/sulfonamide; polyketide*; | 5 |
| | fluoroquinolone; Lactams; aminoglycoside | |
| 1620109 | other (benzene derived)/sulfonamide; polyketide*; | 5 |
| | fluoroquinolone; Lactams; aminoglycoside | |
| 257457 | other (benzene derived)/sulfonamide; polyketide*; | 5 |
| | fluoroquinolone; Lactams; aminoglycoside | |
| 3568404 | other (benzene derived)/sulfonamide; polyketide*; | 5 |
| | fluoroquinolone; Lactams; aminoglycoside | |
| 3834404 | other (benzene derived)/sulfonamide; polyketide*; | 5 |
| | fluoroquinolone; Lactams; aminoglycoside | |
| 3111752 | other (benzene derived)/sulfonamide; polyketide*; | 5 |
| | fluoroquinolone; Lactams; aminoglycoside | |
| 3212013 | other (benzene derived)/sulfonamide; polyketide*; | 5 |
| | fluoroquinolone; Lactams; aminoglycoside | |
| 1874583 | other (benzene derived)/sulfonamide; polyketide*; | 5 |
| | fluoroquinolone; Lactams; aminoglycoside | |
| 598913 | other (benzene derived)/sulfonamide; polyketide*; | 5 |
| | fluoroquinolone; Lactams; aminoglycoside | |
| 264905 | other (benzene derived)/sulfonamide; polyketide*; | 5 |
| | fluoroquinolone; Lactams; aminoglycoside | |
| 3261347 | other (benzene derived)/sulfonamide; polyketide*; | 5 |
| | fluoroquinolone; Lactams; aminoglycoside | |
| 3408240 | other (benzene derived)/sulfonamide; polyketide*; | 5 |
| | fluoroquinolone; Lactams; aminoglycoside | |
| 391624 | other (benzene derived)/sulfonamide; polyketide*; | 5 |
| | fluoroquinolone; Lactams; aminoglycoside | |
| 243000 | other (benzene derived)/sulfonamide; polyketide*; | 5 |
| | fluoroquinolone; Lactams; aminoglycoside | |
| 3268640 | other (benzene derived)/sulfonamide; polyketide*; | 5 |
| | fluoroquinolone; Lactams; aminoglycoside | |
| 2606811 | other (benzene derived)/sulfonamide; polyketide*; | 5 |
| | fluoroquinolone; Lactams; aminoglycoside | |
| 2859889 | other (benzene derived)/sulfonamide; polyketide*; | 5 |
| | fluoroquinolone; Lactams; aminoglycoside | |
| 3425108 | other (benzene derived)/sulfonamide; polyketide*; | 5 |
| | fluoroquinolone; Lactams; aminoglycoside | |
| 3425135 | other (benzene derived)/sulfonamide; polyketide*; | 5 |
| | fluoroquinolone; Lactams; aminoglycoside | |
| 3425138 | other (benzene derived)/sulfonamide; polyketide*; | 5 |
| | fluoroquinolone; Lactams; aminoglycoside | |
| 2710850 | other (benzene derived)/sulfonamide; polyketide*; | 5 |
| | fluoroquinolone; Lactams; aminoglycoside | |
| 348344 | other (benzene derived)/sulfonamide; polyketide*; | 5 |
| | fluoroquinolone; Lactams; aminoglycoside | |
| 348328 | other (benzene derived)/sulfonamide; polyketide*; | 5 |
| | fluoroquinolone; Lactams; aminoglycoside | |
| 348305 | other (benzene derived)/sulfonamide; polyketide*; | 5 |
| | fluoroquinolone; Lactams; aminoglycoside | |
| 88928 | other (benzene derived)/sulfonamide; polyketide*; | 5 |
| | fluoroquinolone; Lactams; aminoglycoside | |
| 1073545 | other (benzene derived)/sulfonamide; polyketide*; | 5 |
| | fluoroquinolone; Lactams; aminoglycoside | |
| 88943 | other (benzene derived)/sulfonamide; polyketide*; | 5 |
| | fluoroquinolone; Lactams; aminoglycoside | |
| 1755406 | other (benzene derived)/sulfonamide; polyketide*; | 5 |
| | fluoroquinolone; Lactams; aminoglycoside | |
| 2920142 | other (benzene derived)/sulfonamide; polyketide*; | 5 |
| | fluoroquinolone; Lactams; aminoglycoside | |
| 1073556 | other (benzene derived)/sulfonamide; polyketide*; | 5 |
| | fluoroquinolone; Lactams; aminoglycoside | |
| 3212079 | other (benzene derived)/sulfonamide; polyketide*; | 5 |
| | fluoroquinolone; Lactams; aminoglycoside | |
| 3212082 | other (benzene derived)/sulfonamide; polyketide*; | 5 |
| | fluoroquinolone; Lactams; aminoglycoside | |
| 3212085 | other (benzene derived)/sulfonamide; polyketide*; | 5 |
| | fluoroquinolone; Lactams; aminoglycoside | |
| 3112778 | other (benzene derived)/sulfonamide; polyketide*; | 5 |
| | fluoroquinolone; Lactams; aminoglycoside | |
| 2920152 | other (benzene derived)/sulfonamide; polyketide*; | 5 |
| | fluoroquinolone; Lactams; aminoglycoside | |

*(tetracycline)

TABLE 4c
Detailed results for the genes in Example
1 (corresponding to Table 2, continued)

| | | | | | | #signif- |
|---|---|---|---|---|---|---|
| | | | | | #signif- | icant |
| | | | | | icant | other |
| | | | #signif- | #signif- | poly- | (benzene |
| | | #signif- | icant | icant | ketide | derived)/ |
| | best | icant | fluoro- | aminogly- | (tetra- | sulfon- |
| POS | drug | Lactams | quinolones | cosides | cycline) | amide |
| 884837 | LVX | 13 | 2 | 2 | 1 | 1 |
| 3727017 | CP | 13 | 2 | 2 | 1 | 1 |
| 2887795 | AM | 13 | 2 | 2 | 1 | 1 |
| 1071328 | LVX | 13 | 2 | 2 | 1 | 1 |
| 291053 | CP | 13 | 2 | 2 | 1 | 1 |
| 1276055 | CP | 13 | 2 | 2 | 1 | 1 |
| 3455306 | AM | 13 | 2 | 2 | 1 | 1 |
| 777725 | CP | 13 | 2 | 2 | 1 | 1 |
| 2895753 | CP | 13 | 2 | 2 | 1 | 1 |
| 3425049 | CP | 13 | 2 | 2 | 1 | 1 |
| 289027 | CP | 13 | 2 | 2 | 1 | 1 |
| 2710849 | CP | 13 | 2 | 2 | 1 | 1 |
| 1757128 | CP | 13 | 2 | 2 | 1 | 1 |
| 1510433 | LVX | 13 | 2 | 2 | 1 | 1 |
| 221638 | CP | 13 | 2 | 2 | 1 | 1 |
| 3110710 | CP | 13 | 2 | 2 | 1 | 1 |
| 447957 | CP | 13 | 2 | 2 | 1 | 1 |
| 3462897 | CP | 13 | 2 | 2 | 1 | 1 |
| 3068809 | AM | 13 | 2 | 2 | 1 | 1 |
| 3428448 | CP | 13 | 2 | 2 | 1 | 1 |
| 348383 | CP | 13 | 2 | 2 | 1 | 1 |
| 2919827 | CP | 13 | 2 | 2 | 1 | 1 |
| 1073537 | LVX | 13 | 2 | 2 | 1 | 1 |
| 1755741 | CAZ | 13 | 2 | 2 | 1 | 1 |
| 3266655 | AM | 13 | 2 | 2 | 1 | 1 |
| 3218006 | CP | 13 | 2 | 2 | 1 | 1 |
| 88925 | CP | 13 | 2 | 2 | 1 | 1 |
| 3957911 | CP | 13 | 2 | 2 | 1 | 1 |
| 2887043 | AM | 13 | 2 | 2 | 1 | 1 |
| 2149065 | CP | 13 | 2 | 2 | 1 | 1 |
| 2407421 | CP | 13 | 2 | 2 | 1 | 1 |
| 1999549 | CAZ | 13 | 2 | 2 | 1 | 1 |
| 2572909 | CP | 13 | 2 | 2 | 1 | 1 |
| 2386045 | CP | 13 | 2 | 2 | 1 | 1 |
| 1620109 | LVX | 13 | 2 | 2 | 1 | 1 |
| 257457 | CP | 13 | 2 | 2 | 1 | 1 |
| 3568404 | LVX | 13 | 2 | 2 | 1 | 1 |
| 3834404 | CP | 13 | 2 | 2 | 1 | 1 |
| 3111752 | LVX | 13 | 2 | 2 | 1 | 1 |
| 3212013 | AM | 13 | 2 | 2 | 1 | 1 |
| 1874583 | CP | 13 | 2 | 2 | 1 | 1 |
| 598913 | CP | 13 | 2 | 2 | 1 | 1 |
| 264905 | LVX | 13 | 2 | 2 | 1 | 1 |
| 3261347 | AM | 13 | 2 | 2 | 1 | 1 |
| 3408240 | CP | 13 | 2 | 2 | 1 | 1 |
| 391624 | CP | 13 | 2 | 2 | 1 | 1 |
| 243000 | CP | 13 | 2 | 2 | 1 | 1 |
| 3268640 | LVX | 13 | 2 | 2 | 1 | 1 |
| 2606811 | CP | 13 | 2 | 2 | 1 | 1 |
| 2859889 | CP | 13 | 2 | 2 | 1 | 1 |
| 3425108 | CP | 13 | 2 | 2 | 1 | 1 |
| 3425135 | CP | 13 | 2 | 2 | 1 | 1 |
| 3425138 | CP | 13 | 2 | 2 | 1 | 1 |
| 2710850 | CP | 13 | 2 | 2 | 1 | 1 |
| 348344 | CP | 13 | 2 | 2 | 1 | 1 |
| 348328 | CP | 13 | 2 | 2 | 1 | 1 |
| 348305 | CP | 13 | 2 | 2 | 1 | 1 |
| 88928 | CP | 13 | 2 | 2 | 1 | 1 |
| 1073545 | LVX | 13 | 2 | 2 | 1 | 1 |
| 88943 | CP | 13 | 2 | 2 | 1 | 1 |
| 1755406 | IMP | 13 | 2 | 2 | 1 | 1 |
| 2920142 | AM | 13 | 2 | 2 | 1 | 1 |
| 1073556 | LVX | 13 | 2 | 2 | 1 | 1 |
| 3212079 | AM | 13 | 2 | 2 | 1 | 1 |
| 3212082 | AM | 13 | 2 | 2 | 1 | 1 |
| 3212085 | AM | 13 | 2 | 2 | 1 | 1 |
| 3112778 | CP | 13 | 2 | 2 | 1 | 1 |
| 2920152 | AM | 13 | 2 | 2 | 1 | 1 |

TABLE 4d
Detailed results for the genes in Example
1 (corresponding to Table 2, continued)

| | | | genbank protein |
|---|---|---|---|
| POS | p-value | gene name | accession number |
| 884837 | 5.5144E−115 | ABTJ_00846 | YP_006288764.1 |
| 3727017 | 7.58233E−62 | ABTJ_03609 | YP_006291461.1 |
| 2887795 | 1.1364E−56 | ABTJ_02823 | YP_006290709.1 |
| 1071328 | 1.01762E−55 | ABTJ_01043 | YP_006288960.1 |
| 291053 | 1.47802E−53 | ABTJ_00276 | YP_006288235.1 |
| 1276055 | 8.25909E−53 | ABTJ_01220 | YP_006289132.1 |
| 3455306 | 5.07927E−52 | ABTJ_03349 | YP_006291212.1 |
| 777725 | 7.4611E−52 | ABTJ_00758 | YP_006288686.1 |
| 2895753 | 9.49807E−52 | ABTJ_02830 | YP_006290716.1 |
| 3425049 | 3.58997E−51 | ABTJ_03319 | YP_006291182.1 |
| 289027 | 5.57597E−51 | ABTJ_00275 | YP_006288234.1 |
| 2710849 | 6.34201E−51 | ABTJ_02615 | YP_006290504.1 |
| 1757128 | 2.10615E−50 | ABTJ_01710 | YP_006289610.1 |
| 1510433 | 8.27894E−50 | ABTJ_01447 | YP_006289351.1 |
| 221638 | 1.60469E−49 | ABTJ_00199 | YP_006288164.1 |
| 3110710 | 1.60469E−49 | ABTJ_03034 | YP_006290909.1 |
| 447957 | 4.31622E−49 | ABTJ_00438 | YP_006288393.1 |
| 3462897 | 6.93483E−49 | ABTJ_03359 | YP_006291222.1 |
| 3068809 | 8.09645E−49 | ABTJ_02996 | YP_006290873.1 |
| 3428448 | 2.03596E−48 | ABTJ_03324 | YP_006291187.1 |
| 348383 | 2.52076E−48 | ABTJ_00328 | YP_006288283.1 |
| 2919827 | 3.82276E−48 | ABTJ_02848 | YP_006290734.1 |
| 1073537 | 4.25625E−48 | ABTJ_01046 | YP_006288963.1 |
| 1755741 | 1.69988E−47 | ABTJ_01709 | YP_006289609.1 |
| 3266655 | 2.93721E−47 | ABTJ_03172 | YP_006291035.1 |
| 3218006 | 4.12082E−47 | ABTJ_03125 | YP_006290996.1 |
| 88925 | 6.5407E−47 | ABTJ_00081 | YP_006288046.1 |
| 3957911 | 1.00789E−46 | ABTJ_03829 | YP_006291666.1 |
| 2887043 | 1.03502E−46 | ABTJ_02822 | YP_006290708.1 |
| 2149065 | 1.74663E−46 | ABTJ_02072 | YP_006289970.1 |
| 2407421 | 2.64691E−46 | ABTJ_02327 | YP_006290220.1 |
| 1999549 | 2.69645E−46 | ABTJ_01930 | YP_006289828.1 |
| 2572909 | 4.22328E−46 | ABTJ_02481 | YP_006290373.1 |
| 2386045 | 4.64093E−46 | ABTJ_02308 | YP_006290201.1 |
| 1620109 | 9.0963E−46 | ABTJ_01573 | YP_006289477.1 |
| 257457 | 1.08314E−45 | ABTJ_00242 | YP_006288203.1 |
| 3568404 | 1.12995E−45 | ABTJ_03452 | YP_006291310.1 |
| 3834404 | 1.23824E−45 | ABTJ_03712 | YP_006291555.1 |
| 3111752 | 1.57276E−45 | ABTJ_03035 | YP_006290910.1 |
| 3212013 | 1.57276E−45 | ABTJ_03119 | YP_006290990.1 |
| 1874583 | 1.66624E−45 | ABTJ_01813 | YP_006289713.1 |
| 598913 | 1.70556E−45 | ABTJ_00590 | YP_006288527.1 |
| 264905 | 2.52673E−45 | ABTJ_00252 | YP_006288213.1 |
| 3261347 | 2.88605E−45 | ABTJ_03168 | YP_006291031.1 |
| 3408240 | 4.00289E−45 | ABTJ_03301 | YP_006291164.1 |
| 391624 | 5.50442E−45 | ABTJ_00371 | YP_006288326.1 |
| 243000 | 6.82911E−45 | ABTJ_00222 | YP_006288186.1 |
| 3268640 | 7.01381E−45 | ABTJ_03174 | YP_006291037.1 |
| 2606811 | 7.79092E−45 | ABTJ_02522 | YP_006290412.1 |
| 2859889 | 8.74949E−45 | ABTJ_02797 | YP_006290683.1 |
| 3425108 | 3.58997E−51 | ABTJ_03319 | YP_006291182.1 |
| 3425135 | 3.58997E−51 | ABTJ_03319 | YP_006291182.1 |
| 3425138 | 3.58997E−51 | ABTJ_03319 | YP_006291182.1 |
| 2710850 | 6.34201E−51 | ABTJ_02615 | YP_006290504.1 |
| 348344 | 3.16001E−48 | ABTJ_00328 | YP_006288283.1 |
| 348328 | 7.46751E−48 | ABTJ_00328 | YP_006288283.1 |
| 348305 | 1.78415E−47 | ABTJ_00328 | YP_006288283.1 |
| 88928 | 6.5407E−47 | ABTJ_00081 | YP_006288046.1 |
| 1073545 | 9.26857E−47 | ABTJ_01046 | YP_006288963.1 |
| 88943 | 1.09578E−46 | ABTJ_00081 | YP_006288046.1 |
| 1755406 | 3.64073E−46 | ABTJ_01709 | YP_006289609.1 |
| 2920142 | 4.51808E−46 | ABTJ_02848 | YP_006290734.1 |
| 1073556 | 1.45321E−45 | ABTJ_01046 | YP_006288963.1 |
| 3212079 | 1.57276E−45 | ABTJ_03119 | YP_006290990.1 |
| 3212082 | 1.57276E−45 | ABTJ_03119 | YP_006290990.1 |
| 3212085 | 1.57276E−45 | ABTJ_03119 | YP_006290990.1 |
| 3112778 | 1.97339E−45 | ABTJ_03035 | YP_006290910.1 |
| 2920152 | 2.33812E−45 | ABTJ_02848 | YP_006290734.1 |

[0178] In Tables 3 and 4a-4d the columns are designated as follows:

Gene name: affected gene;
POS: genomic position of the SNP/variant in the Acinetobacter reference genome (see above);
p-value: significance value calculated using Fishers exact test (determined according to FDR (Benjamini Hochberg) method (Benjamini Hochberg, 1995));
genbank protein accession number: (NCBI) Accession number of the corresponding protein of the genes

[0179] Also the antibiotic/drug classes, the number of significant antibiotics correlated to the mutations (over all antibiotics or over certain classes), as well as the correlated antibiotics are denoted in the Tables.

[0180] The p-value was calculated using the Fisher exact test based on contingency table with 4 fields: #samples Resistant/wild type; #samples Resistant/mutant; #samples not Resistant/wild type; #samples not Resistant/mutant

[0181] The test is based on the distribution of the samples in the 4 fields. Even distribution indicates no significance, while clustering into two fields indicates significance.

[0182] The following results were obtained
[0183] A total of approximately 59.000 different correlations between genetic sites and anti-microbial agents were detected (p-value <10⁻⁹).
[0184] The biggest part of these were point mutations (i.e. single base exchanges), and the highest significance was reached for a mutation in YP_006288764.1 at 10⁻¹¹⁵, particular in position 884837 with regard to reference genome NC_017847 as annotated at the NCBI is a non-synonymous coding, particularly a codon change tTa/tCa
[0185] Besides these, insertions or deletions of up to four bases were discovered
[0186] Further, potential genetic tests for five different drug classes relating to resistances were discovered
   [0187] β-lactams (includes Penicillins, Cephalosporins, Carbapenems, Monobactams)
   [0188] Quinolones, particularly Fluoroquinolones
   [0189] Aminoglycosides
   [0190] Polyketides, particularly Tetracyclines
   [0191] Folate synthesis inhibitors
[0192] Potential genetic tests for all tested drugs/drug combinations were discovered:

### Amoxicillin/Clavulanate, Ampicillin, Ampicillin/Sulbactam,

[0193] Aztreonam, Cefazolin, Cefepime, Ceftazidime, Cefuroxime, Cephalothin, Imipenem, Piperacillin/Tazobactam, Ciprofloxacin, Levofloxacin, Gentamycin, Tobramycin, Tetracycline, Trimethoprim/Sulfamethoxazol
[0194] Mutations were observed in 3.312 different genes

[0195] While in the tables only the best mutations in each gene are represented, a manifold of different SNPs has been found for each gene. Examples for multiple SNPs for two of the genes given in Table 3 are shown in the following Tables 5 and 6.

TABLE 5
Statistically significant SNPs in gene ABTJ_00081 (genbank protein accession
number YP_006288046.1) (headers as in Tables 3 and 4, respectively)

| | | | | best | |
|---|---|---|---|---|---|
| POS | drug | #drugs | drug class | drug | p-value |
| 89304 | MER | 1 | Lactams | MER | 7.6600E−012 |
| 88612 | T/S; TE; CFT; LVX; GM; IMP; A/S; | 19 | other*; polyketide (tetracycline); | CP | 6.489E−031 |
| | CRM; ETP; CP; CAX; AZT; P/T; CPE; | | fluoroquinolone; Lactams; | | |
| | AM; CAZ; TO; MER; AUG | | aminoglycoside | | |
| 88869 | TE; LVX; CP | 3 | fluoroquinolone; polyketide | CP | 1.84673157469157E−012 |
| | | | (tetracycline) | | |
| 89260 | CP; IMP; CRM; ETP; LVX; AM; AUG | 7 | fluoroquinolone; Lactams | CP | 4.3485E−011 |
| 88688 | T/S; TE; CFT; LVX; GM; IMP; A/S; | 19 | Other*; polyketide (tetracycline); | CP | 1.1041E−036 |
| | CRM; ETP; CP; CAX; AZT; P/T; CPE; | | fluoroquinolone; Lactams; | | |
| | AM; CAZ; TO; MER; AUG | | aminoglycoside | | |
| 89129 | T/S; TE; CFT; GM; IMP; A/S; CP; | 13 | Other*; polyketide (tetracycline); | TE | 5.5320E−025 |
| | CAX; P/T; LVX; AM; CAZ; AUG | | fluoroquinolone; Lactams; | | |
| | | | aminoglycoside | | |
| 88657 | T/S; TE; CFT; GM; IMP; A/S; CRM; | 17 | Other*; polyketide (tetracycline); | CP | 2.0725E−021 |
| | ETP; CP; CAX; P/T; CPE; AM; CAZ; | | fluoroquinolone; Lactams; | | |
| | LVX; MER; AUG | | aminoglycoside | | |
| 89186 | T/S; TE; CFT; LVX; GM; IMP; A/S; | 19 | Other*; polyketide (tetracycline); | CP | 1.2553E−038 |
| | CRM; ETP; CP; CAX; AZT; P/T; CPE; | | fluoroquinolone; Lactams; | | |
| | AM; CAZ; TO; MER; AUG | | aminoglycoside | | |
| 89258 | IMP; CP; LVX; AM | 4 | fluoroquinolone; Lactams | CP | 8.9306E−011 |
| 89114 | IMP; CAZ; AUG | 3 | Lactams | IMP | 2.5946E−012 |
| 88800 | T/S; CP; LVX; AM | 4 | Other*; fluoroquinolone; Lactams | CP | 2.2205E−012 |
| 88922 | T/S; TE; CFT; LVX; GM; IMP; A/S; | 19 | Other*; polyketide (tetracycline); | CP | 1.2360E−025 |
| | CRM; ETP; CP; CAX; AZT; P/T; CPE; | | fluoroquinolone; Lactams; | | |
| | AM; CAZ; TO; MER; AUG | | aminoglycoside | | |
| 88716 | T/S; TE; CFT; GM; IMP; A/S; CRM; | 17 | Other*; polyketide (tetracycline); | TE | 1.1287E−037 |
| | ETP; CP; CAX; P/T; CPE; AM; CAZ; | | fluoroquinolone; Lactams; | | |
| | LVX; MER; AUG | | aminoglycoside | | |
| 89527 | T/S; TE; CFT; GM; IMP; ETP; CP; | 12 | Other*; polyketide (tetracycline); | CP | 2.8478E−014 |
| | CAX; LVX; AM; CAZ; AUG | | fluoroquinolone; Lactams; | | |
| | | | aminoglycoside | | |
| 88695 | T/S; TE; CFT; LVX; GM; IMP; A/S; | 19 | Other*; polyketide (tetracycline); | CP | 2.4167E−034 |
| | CRM; ETP; CP; CAX; AZT; P/T; CPE; | | fluoroquinolone; Lactams; | | |
| | AM; CAZ; TO; MER; AUG | | aminoglycoside | | |
| 88838 | T/S; CP; CFT; IMP; CRM; MER; LVX; | 10 | Other*; fluoroquinolone; Lactams | AUG | 2.2215E−017 |
| | AM; CAZ; AUG | | | | |
| 88928 | T/S; TE; CFT; LVX; GM; IMP; A/S; | 19 | Other*; polyketide (tetracycline); | CP | 6.5407E−047 |
| | CRM; ETP; CP; CAX; AZT; P/T; CPE; | | fluoroquinolone; Lactams; | | |
| | AM; CAZ; TO; MER; AUG | | aminoglycoside | | |
| 89279 | MER; GM; IMP; ETP; TO; AM; CAZ; | 8 | fluoroquinolone; aminoglycoside; | MER | 1.2317E−016 |
| | LVX | | Lactams | | |
| 89336 | TE; CFT; IMP; A/S; CP; CAX; P/T; | 11 | fluoroquinolone; polyketide | IMP | 9.3827E−017 |
| | LVX; AM; CAZ; AUG | | (tetracycline); Lactams | | |
| 88943 | T/S; TE; CFT; LVX; GM; IMP; A/S; | 19 | Other*; polyketide (tetracycline); | CP | 1.0958E−046 |
| | CRM; ETP; CP; CAX; AZT; P/T; CPE; | | fluoroquinolone; Lactams; | | |
| | AM; CAZ; TO; MER; AUG | | aminoglycoside | | |
| 88704 | T/S; TE; CFT; GM; CP; CAX; LVX; | 8 | Other*; polyketide (tetracycline); | CP | 1.3255E−014 |
| | CAZ | | fluoroquinolone; Lactams; | | |
| | | | aminoglycoside | | |
| 88918 | T/S; TE; CFT; LVX; GM; IMP; A/S; | 19 | Other*; polyketide (tetracycline); | CP | 9.3418E−030 |
| | CRM; ETP; CP; CAX; AZT; P/T; CPE; | | fluoroquinolone; Lactams; | | |
| | AM; CAZ; TO; MER; AUG | | aminoglycoside | | |
| 89228 | T/S; TE; CFT; CP; LVX; AM | 6 | Other*; polyketide (tetracycline); | CP | 1.0247E−012 |
| | | | fluoroquinolone; Lactams | | |
| 88780 | TE | 1 | polyketide (tetracycline) | TE | 4.9754E−011 |
| 89259 | IMP; CP; LVX; AM | 4 | fluoroquinolone; Lactams | CP | 8.9306E−011 |
| 88925 | T/S; TE; CFT; LVX; GM; IMP; A/S; | 19 | Other*; polyketide (tetracycline); | CP | 6.5407E−047 |
| | CRM; ETP; CP; CAX; AZT; P/T; CPE; | | fluoroquinolone; Lactams; | | |
| | AM; CAZ; TO; MER; AUG | | aminoglycoside | | |
| 88872 | T/S; TE; CFT; LVX; GM; IMP; A/S; | 19 | Other*; polyketide (tetracycline); | CP | 4.2825E−043 |
| | CRM; ETP; CP; CAX; AZT; P/T; CPE; | | fluoroquinolone; Lactams; | | |
| | AM; CAZ; TO; MER; AUG | | aminoglycoside | | |
| 88999 | CAZ; CP; LVX; GM | 4 | fluoroquinolone; aminoglycoside; | GM | 7.4990E−012 |
| | | | Lactams | | |
| 88605 | T/S; TE; CFT; LVX; GM; IMP; A/S; | 19 | Other*; polyketide (tetracycline); | CP | 4.1331E−027 |
| | CRM; ETP; CP; CAX; AZT; P/T; CPE; | | fluoroquinolone; Lactams; | | |
| | AM; CAZ; TO; MER; AUG | | aminoglycoside | | |
| 88840 | T/S; CP; CFT; IMP; CRM; MER; CPE; | 11 | Other*; fluoroquinolone; | AUG | 5.4973E−018 |
| | AM; CAZ; LVX; AUG | | Lactams | | |
| 89312 | T/S; CP; LVX | 3 | Other*; fluoroquinolone | CP | 9.5395E−012 |
| 88893 | T/S; TE; CFT; LVX; GM; IMP; A/S; | 19 | Other*; polyketide (tetracycline); | CP | 2.7002E−033 |
| | CRM; ETP; CP; CAX; AZT; P/T; CPE; | | fluoroquinolone; Lactams; | | |
| | AM; CAZ; TO; MER; AUG | | aminoglycoside | | |
| 88698 | CP; LVX; AM | 3 | fluoroquinolone; Lactams | CP | 2.8058E−012 |

*(benzene derived)/sulfonamide

TABLE 6
Statistically significant SNPs in gene ABTJ_00199 (genbank protein accession
number YP_006288164.1) (headers as in Tables 3 and 4, respectively)

| | | | | best | |
|---|---|---|---|---|---|
| POS | drug | #drugs | drug class | drug | p-value |
| 220846 | CP; CFT; IMP; CRM; LVX; AM; CAZ; | 8 | fluoroquinolone; Lactams | AUG | 2.5414E−014 |
| | AUG | | | | |
| 221638 | T/S; TE; CFT; LVX; GM; IMP; A/S; | 19 | Other*; polyketide (tetracycline); | CP | 1.6047E−049 |
| | CRM; ETP; CP; CAX; AZT; P/T; CPE; | | fluoroquinolone; Lactams; | | |
| | AM; CAZ; TO; MER; AUG | | aminoglycoside | | |
| 221634 | T/S; TE; CFT; LVX; GM; IMP; A/S; | 19 | Other*; polyketide (tetracycline); | CP | 1.5759E−042 |
| | CRM; ETP; CP; CAX; AZT; P/T; CPE; | | fluoroquinolone; Lactams; | | |
| | AM; CAZ; TO; MER; AUG | | aminoglycoside | | |
| 220474 | T/S; TE; CFT; LVX; GM; IMP; A/S; | 19 | Other*; fluoroquinolone; | CP | 5.1237E−031 |
| | CRM; ETP; CP; CAX; AZT; P/T; CPE; | | Lactams; aminoglycoside | | |
| | AM; CAZ; TO; MER; AUG | | | | |
| 220847 | IMP; CP; LVX; AM; AUG | 5 | fluoroquinolone; Lactams | AUG | 3.4931E−013 |

*(benzene derived)/sulfonamide

[0196] Similar results were obtained for other genes but are omitted for the sake of brevity.

[0197] Further, a synergistic effect of individual SNPs was demonstrated by exhaustively comparing significance levels for association of single SNPs with antibiotic susceptibility/resistance and significance levels for association of combinations of SNPs with antibiotic susceptibility/resistance. For a representative example of 2 SNPs the significance level for synergistic association of two SNPs was improved with the values given in Table 7 compared to the association of either SNP alone, given for exemplary different antibiotics.

TABLE 7
Synergistic increase for association of two SNPs

| drug | POS 1 | Ref | Alt | POS 2 | Ref | Alt | Improv [%] |
|---|---|---|---|---|---|---|---|
| CP | 3462897 | G | A, C | 3727017 | A | C, G | 338.6 |
| LVX | 3462897 | G | A, C | 3727017 | A | C, G | 74274253979.8 |
| CP | 3425049 | A | C | 3727017 | A | C, G | 655.2 |
| LVX | 3425049 | A | C | 3727017 | A | C, G | 218760935770.4 |
| LVX | 3268640 | A | G | 3727017 | A | C, G | 138110524.9 |
| LVX | 3266655 | A | G | 3727017 | A | C, G | 452198217.2 |
| LVX | 3261347 | T | C | 3727017 | A | C, G | 197000599321.8 |
| LVX | 221638 | T | G | 3727017 | A | C, G | 5760092862.3 |
| LVX | 88925 | G | C | 3727017 | A | C, G | 202676.5 |
| LVX | 2149065 | T | C | 3727017 | A | C, G | 482250210362.3 |
| LVX | 2887043 | G | T | 3727017 | A | C, G | 20283973816.8 |
| LVX | 2895753 | T | C | 3727017 | A | C, G | 191737800.2 |
| LVX | 2919827 | A | C | 3727017 | A | C, G | 5274732.5 |
| LVX | 2606811 | T | A, G | 3727017 | A | C, G | 67014510.9 |
| CP | 2572909 | G | A, T | 3727017 | A | C, G | 1804.3 |
| LVX | 2572909 | G | A, T | 3727017 | A | C, G | 2735384961881.3 |
| LVX | 3068809 | A | G, T | 3727017 | A | C, G | 516115660159.6 |
| LVX | 391624 | C | T | 3727017 | A | C, G | 465666635.0 |
| LVX | 447957 | G | A | 3727017 | A | C, G | 5760092862.3 |
| LVX | 1757128 | A | C; AC | 3727017 | A | C, G | 33862144971.2 |
| LVX | 1755741 | A | C, G | 3727017 | A | C, G | 1311661712586.5 |
| LVX | 3110710 | T | C | 3727017 | A | C, G | 3335871890.4 |
| LVX | 243000 | A | C | 3727017 | A | C, G | 415.4 |
| LVX | 3568404 | C | T | 3727017 | A | C, G | 3420309870.6 |
| LVX | 3727017 | A | C, G | 1510433 | G | A | 506388426600.8 |
| LVX | 3727017 | A | C, G | 3957911 | A | C, T | 3851611994.8 |
| LVX | 3727017 | A | C, G | 3218006 | A | G, T | 722065550.3 |
| LVX | 3727017 | A | C, G | 1999549 | A | G | 41247213273.6 |
| LVX | 3727017 | A | C, G | 2386045 | T | C | 9078.8 |
| LVX | 3727017 | A | C, G | 2407421 | C | A | 3693.5 |

POS 1, 2 = position 1, 2 used for combination;
Ref = reference base;
Alt = alternated base in samples;
improv = improvement compared to minium p-value of single SNP

[0198] For example, the improvement of 74274253979.8% in the second example with positions 3462897 and 3727017 for LVX results from a p-value change from 4.03624e-60 to 5.43424e-69.

[0199] Again, similar results were obtained for other SNPs in respective genes.

[0200] Interestingly, it was also observed that the synergistic effect is enhanced for a combination of SNPs in different genes compared to SNPs from the same gene. For example, a combination of two SNPs in gene ABTJ_00276 resulted in a balanced accuracy of 74.42%, a combination of two SNPs in gene ABTJ_02481 resulted in a balanced accuracy of 63.325%, a combination of two SNPs in gene ABTJ_03168 resulted in a balanced accuracy of 58.135%, and a combination of two SNPs in gene ABTJ_03609 resulted in a balanced accuracy of 53.06%. A combination of the SNPs given in Table 3 for these four genes resulted in a balanced accuracy of 80.7%, i.e. a value that is far improved over the combinations in each single gene.

[0201] Again, similar results are obtained for other combinations, also in case just two SNPs of different genes are combined.

[0202] The balanced accuracy is therein defined as the arithmetic mean of sensitivity and specificity=(sensitivity+specificity)/2 with sensitivity=TP/(TP+FN) and specificity=TN/(TN+FP); with TN=true negatives=susceptible and predicted to be susceptible; TP=true positives=resistant and predicted to be resistant; FN=false negatives=resistance, predicted to be susceptible; and FP=false positives=susceptible, predicted to be resistance. It is a better performance estimate than accuracy ((TP+TN)/(number of samples)) in case of imbalanced datasets, e.g. if there are much more resistant samples when non-resistant ones or vice versa. In such cases accuracy may be high though the smaller class is not predicted correctly, then balanced accuracy is less biased by the data imbalance (Example: 11 samples are resistant, 51 are susceptible and TP=50, TN=1, FN=1, FP=10. Then accuracy=(50+1)/62=82.26% and balanced accuracy is ((50/51)+(1/11))/2=53.57%).

[0203] A genetic test for the combined pathogen identification and antimicrobial susceptibility testing direct from the patient sample can reduce the time-to actionable result significantly from several days to hours, thereby enabling targeted treatment. Furthermore, this approach will not be restricted to central labs, but point of care devices can be developed that allow for respective tests. Such technology along with the present methods and computer program products could revolutionize the care, e.g. in intense care units or for admissions to hospitals in general. Furthermore, even applications like real time outbreak monitoring can be achieved using the present methods.

[0204] Instead of using only single variants, a combination of several variant positions can improve the prediction accuracy and further reduce false positive findings that are influenced by other factors.

[0205] Compared to approaches using MALDI-TOF MS, the present approach has the advantage that it covers almost the complete genome and thus enables us to identify the potential genomic sites that might be related to resistance. While MALDI-TOF MS can also be used to identify point mutations in bacterial proteins, this technology only detects a subset of proteins and of these not all are equally well covered. In addition, the identification and differentiation of certain related strains is not always feasible.

[0206] The present method allows computing a best breakpoint for the separation of isolates into resistant and susceptible groups. The inventors designed a flexible software tool that allows to consider—besides the best breakpoints—also values defined by different guidelines (e.g. European and US guidelines), preparing for an application of the GAST in different countries.

[0207] The inventors demonstrate that the present approach is capable of identifying mutations in genes that are already known as drug targets, as well as detecting potential new target sites.

[0208] The current approach enables
[0209] a. Identification and validation of markers for genetic identification and susceptibility/resistance testing within one diagnostic test
[0210] b. validation of known drug targets and modes of action
[0211] c. detection of potentially novel resistance mechanisms leading to putative novel target/secondary target genes for new therapies

The application's sequence listing, which the Patent Office published only in electronic form, follows.

SEQUENCE LISTING (1 sequence)

SEQ ID NO: 1 - DNA, 3964912 bp, Acinetobacter baumannii MDR-TJ (residues 1-1,982,456 of 3,964,912)
ttatacacaaagtaattgtttatttttattaagacttttaagatatacacttcttatttacatacttatcaacaaaccttgatgtgaagttgattttgatttggtatatttgaatttaaattcatattttttagttatccacaatttggatcagccctattaaataaattcaaattttaaaatttaaatttattcttattagtgtggacttttcttgtggatttcacagttttaaatttaaaaaacatatatttgaactgttgataactctgtttttattgtctttatggattgtggataagtttatgtgataatttatccacaggatgtgcaaaaagttattcacaattgattttgaatttaaatttattcacaagagatttctttttaggcaaaatcaaacgaaatcgtcatgacagatgtggataacttgggtagaatggcgaccccttctcatcaggaagggttaatctttaaatgatttgaatttaaaacgcagacataggggatacacatgctttggacagactgcttaactcgcttgcgacaagagctctctgataacgtctttgcgatgtggattcgccctttagtagctgaagaagtagaggggatactacgtctctatgctcctaatccttattggacgcgttatattcaagagaatcatttagagttaatttctatattggctgaacaattgtcagaagggcgggtgcgtcaggttgaaatcttggtagattctcgtcctggtagtattttgtcctctagtgaacagcctgcaacaactacagcagctttacaaactgcccctatacctcaacctgctaaggttaaaagagaaccggaacctgttgctaatactgcagttagttctaagagttcaaaaaagaaactattaaatccacaatttactttttcactatttgttgaaggccgttctaaccaaatggcagcagaaacctgtagaaaagtattaacacagttaggtgcttctcaacataaccctttgtttttatatggtccgacaggtctaggtaagactcacttaatgcaagcagttggtaatgccttactgcaagcgaagccgaatgcaagagtcatgtatatgacttcagaaagttttgtacaagattttgtgagctcattacaaaaaggaaaggtagaagagtttaagaaaaattgccgttctttagacttgttattagtagatgatattcatcttttggcaggaaaagaagcaagcctcgttgaattcttctatacatttaatgccttacttgatgaatccaaacaaattattttaacgtcagatcgataccctaaagaattaacagaacttgatcctcgattggtttctcgtttttcttggggactgtcagtaggtgttgaaccacctgatattgaaactcgaatcgaaattctgcttaaaaaagctgaaaatagtggcgttgatttacctagaaactgtgcgttgtttattgcccaacaagtcgtagcgaacgtacgtgaacttgagggcgcactgaataaagttgtcgcaatttcacgttttaaaggtgctccaattgaccttgatgtcgtacgggaatctttaaaagatgttttagcgatccgtgctcgtacaattagtgtagaaaatatccagcgtgtagtgagtgaatatttccgaattccattaaaagagctggtaggtccaaagcgtacccgaatttatgctcgaccacgtcagttggcgatggggcttgcccgtgaattaacgggagatagttttcctgaaattggaatggcttttggtgggcgtgatcacagtacagtgatgcatgcttgtgaaaaagtcgtcagtttacgggaagaagacccaatctttgatgaagattataagaacttattacgtttgcttcaaagttaatgaaataataagacgttgttgcaaagtctacgtaagtgcagcatagtacacagctaaaaaatgaaatgtttgctccaagttgctagaggaatgaatcgtgcgtttgaaaatcgctaaagaaagtttactcaatgttttatcgcatgtggtcggtgcggtagaacgtcgtcataccttgaatattctttcaaacgtcaaaattcagactaatgctcaagcgctcactattacgggttccgatttagaagttgaactcgtagcgagcaccgctttatcagaaggggcgtgccttgaggcaggcgagacaactgttcctgctcgtaaattgatggaaatttgtaaatctttgcctacagctgcattgattgatttacaaattactgaagatcaaagatgtattttaaagtctggtaatagccgttttgtgctaggtacactaccggctgaagattatccattgttaaccactgagaatagccaaggtacgcaagtacaggtgactcaacgtgaattaaagcgtttatttgaaaaaactgcttttgcaatggctgtacaagatgtacgtttttacctcactggtactttattagaaattgatgaaaatcaattgcgtgcagtaacaactgatggtcaccgtttagcactttgtgaaattttggcttcctctacttcatctcagctggtacaagcgattgtgcctcgtaaagctgtgggcgaattgcaacgtttactcagcattgaagatgaacagctcacattgcttattggccgtgaattattaaatgtaacgattaatacgccaagccgtgataaagaacaaggtgatattacagttcgctttacaactaaattgattgatgggaaattccctgattatcgccgtgttattccacgtggtggtgataaacatgttttgattggtcatgacgtatttaaacaatcattacaacgtgtagcaattttaagtaatgaaaaattgcgtggtgttttcctaaacttcaatcaggattctttacagcttcgtgcaaataaccctgaacaagatgaagcaattgaagatttagcgatccaatatcaaaatgccccattagaaatgtcatttaatgctcaatacctactcgatgtgttgggtgtgttagatggtgatgatgtaaatatgagcatgactgaggcgaatcagtctgtattggttcaagatccggctcaccctgaccagacctatgtggttatgccgatgcgtgtttaatctggtttaactatatgcatcttacgcgcttaaatattgaacgtgtgcgtaatttaaaaacggttgcactccatgggttgcaaccgtttaatgtcttttatggcgcaaacggttcgggtaaaacatcaattttagaagcgatccatttgcttgcaacaggtcgctcattccgtacacatatacccaaaaattatattcaatatgaagctgacgacgcgattgtatttgctcagtcagcaactgaaaaaattggtatgcagaaactcgcttctggtgagcaactcatgaaagtgaatggcgataccgttgcgactcaaggtcagctcgcaaagttacttcctttacagcatattgatccacaaagtacggatattattgatcatggtgccaagccaagaagacaacttttagattggcttatgttccacgtggaacctgaattttattttgcgtggcaatattactctcgtgcgctaaagcagcgtaataccttactcaaaacacggcgtaatctttcattagctgatttagaaccgtggaacaaaatgttgagtaattatggcgagattttgcactcacagcgtttaagtattgtcgagcaatggaatgtttatttccaaaatgacttaagtcaattactgcctgatttggagattgagctggaatatagcccaggttttcatacagagcaggggcttatgcaagacttgctgaatcagcatcaaaaagacatcgagagacgttataccgagtatggtcctcatcgggcagatttgcgcttaaaaacgccatttggacatgctgatgatgttttatcaagaggtcagaaaaaactcttgattattgccttaaaactgtcacaaattgcaatgttgcatgcgagtaataaggaaactgtggtattattagatgatctgacagcagaattagacttaaccgcacaacaacgtttaattgaacgattaagccaacttggtagccaggtttttatgacaactttagatcatgcatcggtaaaaaaacatttacatgatctgtctatttcatatcaattattcagtgttgaatccggtcaagttagtcttgctgcgccataattttttgatgttacccatctttgaataaacctatatttgctagggagaaaccatgagttcagagtctcaatcagcctctcaaacagaacaaaccaatgaaaaggcttatgattcctctagtattaaagtattacgtggattagatgcagttcgtaaacgtccgggtatgtatattggggatacagacgacggtaccggtttacaccatatggtgtttgaggttgtcgataatgcaatcgatgaagctttagctggccactgtgatgaaattattgtcacgattcacgaggatgaatcggtcagtgtttcagataatggccgcggtattccaaccgatattcaccctgaagaaggggtttctgctgcagaagtaattttaacgattctgcacgcaggcggtaagtttgacgataatagctataaagtttcaggtggcttacacggcgtaggtgtttcggttgttaacgcactttcaagtaaattgcatttaacgatttaccgtgctggtcaaatccatgagcaagaatatcatcatggtgatccgcaatatccattgcgtgtgattggtgaaacggataataccggaacaactgtacgtttttggccaagtgcagaaacattcagtcaaaccatttttaatgttgaaattctagcacgccgtttacgtgagctttctttcttgaatgctggtgtacgtatcgttttacgtgatgaacgtattaaccttgagcatgtgtatgactatgaaggcggtttatctgagtttgtaaaatacatcaacgaaggtaaaaaccatctcaacgaaatcttccatttcacagctgatgctgacaacggtattgctgtagaagttgcattgcaatggaacgatagttaccaagaaaatgttcgctgtttcacaaacaacattccacaaaaagatggtggtacgcacttagcaggtttccgcgcagctttaacacgtggcttaaaccagtatcttgaaaatgaaaatattctcaagaaagaaaaagtgaatgtgactggtgatgatgcgcgtgaaggtttaacagcgattatttctgttaaggttcctgatccgaaattctcgtctcagacaaaagaaaaattggtatcaagtgaggtaaaaccagcggtagagcaagcaatgaacaaagagttctctgcttacttacttgagaatccacaagctgcaaaatcaattgcaggcaagattattgatgctgcacgagcacgtgatgctgcacgtaaagcgcgtgaaatgacacgtcgtaagagtgcattagatattgcaggtttgcctggtaaattggctgattgtcaggaaaaagacccagcgctttctgaattgtatcttgtcgagggtgactcagcgggtggtagtgccaaacaaggccgtaaccgtaaaatgcaggctattctacctttaaaaggtaagatcctgaacgttgagcgtgcgcgctttgacaaaatgatctctagtcaggaagtaggtacattaattacagcacttggctgtggtattggccgtgaagaatataaccctgacaagctccgttatcataaaattattattatgaccgatgccgatgtcgatggttcgcacattcgtacattgttattaacattcttcttccgtcaaatgccggagttggtggaacgtggtcatatttatattgcacagccacctttgtataaactcaaaaagggtaagcaagagcaatatattaaagataacgacgcattagaaacttacttgatttcaaatgcgattgatgagcttgctttacatattagtgctgatgcgcctgcaattacaggtgaagcgctggcaaaagtaattcaagactatcaagtttcacaaaagagcttacaacgcttaacgttacgttatcccgcaagcttactggatgcattactcgaagtcgacgcatttaaagcagatcagaaccatgatcaagcttatgtccagcaatgggcggatcaagtacgtgaagctgtacaaagactacagccaagtttgcgccctgaaattacgcttgaaacatttgaacgtgagaatgctcaaggcgagaaatctgcgcattactggccacgtgtaactgtatatgttcataacttgccacatgcttacttacttgacgcaggtttattgaattctgcggaatatgctcgtttattgaagaactcgaagagttggttcaagttaattgaagatggcgcatacttacaaaaaggtgatcgtcgtattcaagtcgctaatttccatcaggtatggcagcacattctgcaagattcacgccgtggaatgatgatccagcgctataaaggtctgggcgagatgaatgctgagcagctttgggaaaccacaatggaccctgaaaaccgtaatatgttacaggtgactattgatgatgcaattgaagctgatcgcatgttctcatgcttaatgggcgatgatgttgaaccacgtcgtgcctttattgaagaaaatgcattaaatgcggatattgatgcttaattgatagcaagattctaaatcagtctagggagagaagatgatgagtcaaaaaattctagcaagtatgctgatttcatgtgcggctttagtgagtcattctgcatttgcagcagacttggaagccgacatgaaaactttagcgaagagcactaaagcctttgctgaagcaaaagatatcgataacgctaaacagcagcttgtgattatgcgccaggcagcattatcttcaaaattatctttacctcataagttggaaggtttaccccctgaaaatgtacaggtaaaagagtaccaagcgggtttagatcagttggttgctgaaattgatcgggttacggtttttgttgataagggacaattggaccaagccaaaactgaagcaattaatctggtaaatattcgtaatgaaaaccacaaaaagtttagataaagttactttaatctaaatcaaataaagggaatgattgattcattccctttatttttagctatataaatttatttaactaaacattaattttctacaaaatctgtaacttgaatgagtgcatggccaaataggtagccagccgttaaaaggatgcagatccacaaaatagctcctgccacattgtaaatcaaaaattttccatagctcatattgcttgagccggcagcgaggggtgcaaaagaacgtgcgaaaggaataaaacgtgctaaaagaatagttttaccgccatgttgcaagaaatagcggttcgttttattcaaatattcttttttaataaaacgtgattttgcttcaaaaatacggtttccaaaatggcggccaatagaataattgacgatatagcctaatgttgctgcaacggtgagcagagtaatcatataaccaagatgcatcagttcaacaaccgagcacaatgcacctacagttaaaagtaagctatctccaggtaaaaagaacataaacacaaaagcggtttcagaaaaaataatcaaaaagagtatggcataaacccatgcaccatactcctgaatcaaaataggtaaaaattgttcaaaattagtaataaaatcaataaaattcattcagtttgtctgatcccgaattaaatacctactcaagaagggtaaaaacgaagttagagaatttagttaaattatctgtgtatggcaacccttaagatgtagcttaagttttatatgttatcaaatttgaatctatctcaaaaatttaacagctgaatgaaactttattagagatcgtccatatttttataagctaataaaaataaaagccagtacagatacttaaatatacgagtactggccaaggtatttaattttcaaatgaggcttccatttcctcaagttccatcatgagttctaagagttgctcttcatattgttcaagcttagctttgagttcggtttgctcattcatcagtttaagcaaatcgtccttacgattagcttcatatagtgaagtatctgctaaagcttcttcgatttcagcaagacgtggttgaagcttttcaatttgagattcaaccttttcaatatttttacggattggtcgagtttgttcacgacggcgagctgcttctttacgctgtgcttctttatcgactttagcgggagctggagcggcagaagatgaattattttgtgctacagcagtctgagcattgatttgttgctggcgtgcttcacgtagccatttagcataatcctgcaaatcaccttcaaactcggtacatttgccaccgtgtaccaaaaggagttcatcacaaacgctggcaataagttgacgttcgtgagaaaccagaacgactgcaccctcaaaatcttgtaaggccatactaagcgcatgacgcatatcaaggtctaagtggttcgttggttcatccagaattaaaacatttgggcgctgccatacaatgagtgctaaggccaaacgagcacgctcacccccagagaagctttcacatggagtatccatgcgttcgccactaaagccaaaactacctaaaaaagaacgtaatgttgcttcactaatttgtttatcggctatccgagcgagttgaagcattgggctggcttgaccatctaaagcgtccatttggtgctgtgcaaagtaaccaatgttaagtagctcggaagctttacgttcacctgccagtaatggtaaatctcccaccaagcttttaatcaatgttgatttacctgcaccattcataccaagcagaccaatacgcgagtttggcgtaatttgaagtttaattttttcagcaatttttttatcgccataacctatgctggcattttctagggtcagcaacggtgaactcattttggtaggttcacggaaactaaaagtaaacggtgtatctacatgagcaggtgcaagttgctgcatgcgttcaagttgcttaatacgactttgtgcctgacgagctttagtggctttagccttaaagcgatcaatgaacttttgtaaatgagcacgggcttcttgctgtttttcaaaagcttgttgttgttgtgctaaacgttcacttcgagtggtctcaaatgtggagtagttacccgtgtaaagagtaagttcctgattctcaatatgaagaatatggtctgtaattgcatctaagaaatctcggtcatgcgagattaaaatgagggtgccctcataagctttgagccaatcttctaaccataaaattgcatccaaatctaagtggttggttggctcatccaataaaagtaagtcagaacgactcatcaatgtacgcgccaaatttagacgcatacgccatccaccagaaaaactagcaacgtttaaacgtaattgatgttctagaaaccctaagccagccatcagctgagctgctttagatggcgcagaataaccatgaatttcatcaaaacggccatgtaatttagccaaatccgagtctgttaattgttcaggttgagcaagtttattttgaatatcccaatattcttcatctccagaaaggacaaaatcgatagcaggcatgtctagggctttaacttcttgcgccatatgagccacagtccatacggaaggacgagtaagcgagccttcatctgctcctaagctaccgagtaatgctgcaaatagtgttgatttacctgcaccattgaccccagttagaccaatcttccaacctgggtgtaattgcatagacgctttttgaaatagaacacgtccaccgcggcgtaaagaaacttggtcaaattgaatcatcttgtcttatcgaggtgagttagggatgctatattttaaagagaactgatcatgaagacaaaactttcggagttttagtttataaatactgagattgcatggttgaattgcttcccattaaagctattcgtctgaaaatatccaaattttgagcaagataggccacatttagaaaaatatggctaaaataaaaacaatttaaaacttggttgataaatgagctactaactaataaaaccagactaaggaaagtcaaatgaaaaaaagattggggatagtaagtgcagtcatttgctgtgctatggggacaacacacgcggggcaaaacgtatgtgtattcgatttattgggtaaatcaggtgaatcctacaaaatgatggaagaatgggcacttgcggcaaaaagttggcaagcggacattacattaattccatttcaagatgaagctctggtagatcgtaggctgcgtgagggtaaatgcgatgcagcttatatgacttcaatgcgagcacgaaactacaataaatttgcaggctcgattgatgcgattgggggcgtgacaagtaatgctattgctcaaaaggcaattagttacgttttagatcaacgtaataaacatcgcatgctaaccacacaaaatggaacaaactatgaggtggttggaattgtccagattggactagcatacttatttgtaagagatagaaacctcaactcaattgagaaagtacgtgggactaagtttgctattttgcaatatgacgcagcccagaaaattatggttgaaagtgtaggtgcccagcctattccttctgagattaccgattttgtgaaaaagtttaatagtggccaagtcgaggcaattgctgcacctgcttatgcttataaacctttagaaattggtaaggggattggagcaaatggagctatgtttacttttcctgtggtgaacgtcacaggggatttaattgcaagaagtgataagtttccggccaattttggaatgaagtctcgtgaatggtttattaaacagttgccacagaacttcgcaatggtaaaacggttagaaaccggtattcctcctaaaattaaattaaatttttcagccgaagataaattgaaatatcagaaaatattacgtgaaggtcgccttggcttaacaaaacaaggtgtatatgacgcgacaatgatgagtgtactcaagcgcgcacgatgcaccattgaacggacaaattttgaatgtacgcttacaggagagtagtttgttttttgatcacaaaaaccctacagatatttcaaagctgaatatgggtatgaaaattgtgaatataaaaaataacttacggaaaattagcgatttttcattttaataaataatttaaatcgaacaaacaatggttcaatgagataaaaatatttgagtaaaagctctatttttttctaaaaaacatgattaatatctgtgtttgaaaggaaacttcaaacaaaaaatctgttccgtggaaggatgaagaaaatgaaaaaaatcgtacttgctatggctgccgcttctgttgttggtttttctgcttcagcgcaagcagcgagtaccgtgtgtgtattcgacctcttaggaaaagcaggcgactcatataaaatgatggaagaatgggctctagctgcaaaaggctggggtactgaaattaacttagttcctcgtcaggacgaggctgttgcagataatgatttcaaagctggtaaatgtgatgccgtagcaatgacagctatgcgtgctcgtcaatataacaaatttgccggatcaatcgactcgcttggtggcgttcctaataaccaaattgcacaacgtgctattacttatgtattagatgcacgtaacgctgcaaaaatgacaactaaccttggtggtaaaaaatacgaagttgctggtatctctccgttaggttcagcgttcattttcgtacgtgataaaaacatcaactcagttgaaaaagctgctggtaaaaaattcgccgtgttaggttatgacgatgcacaaaaaattatggtgcagcgcgtaggtgctcaggcagttctttctgatatttcaaactttgctgctaaatttaataatggtcaggtagatatggtaggtgcgcctgcttatgcatacaaaccattagaattgaacaaaggtttgggcgcaaacggtgtaatgtggaacttcccggtattacatgtaacggctgatttagtattgcgtgctgataaattcccagcaggctttggtcaaaagtctcgtgattggttcgtaaaacaattaccaaaaagctttgcaatgattaaccgtttagaagcacaaattccaggtaaatacaaaatgaacctaagtgctgaagacaaactgaaatatcaaaaaatgttacgtgatggccgtatggatttaactaaacgcggtatttacgatgcaggtatgatgtctgtattgaaaaaagcacgttgttctgtagacaaagctaactttgaatgttcaatgcctggtgaataattcattttgaacttaaaagcctagatttattctaggcttttttgctttctaaaagctgtcaattcagccattgtgattcattaaaaaggcgctaatctaaattgaggataaaacttcatctggatatatgaagatattagaaaatagaacaaggaagtgagtcattaaaagagctaagggaatttaactcgttattttttattgagctcggataaacagaattgatcataaaaatatctaaattgtgaatcttagatgaagcatatctcatgagaatcatgccaaccagcgtgaaatttcttgatgccaaaaacaaaaaatttacaaggaaaggaaaagaatatgcgattttccaaaacgcttttacttgcgatgggactcacaacaatttcatttgcagccgaggccaaacaaaccatatgtgtttttgactttgttggtaaaaatggcgatgtctatgcactcatgaaggactatcagcttgcagcgaaaaactggggagctgatatcgaactaaaagtaaaccagaatgaagcagtgattgctgaagattttaaagcgggcaaatgtgatggtattagtgtatcaggcatgcgcggacgtcaattcaactcatttacgggatcattagatgcaattggcgcgattccagatctcaaacttgctgttaaagtcatgcaaggtttagcgagccaaacctttagtaaatatatggtcaatggccgctatgaggtagtaggtgttattccggtaggagatgcttaccttttagtaaacgaccatagtattaataccgtagcgaaagctgccggtaaaaaaatcgccgtattagactacgatgaagcacaaaaaattatggttcagcaggtgggtgctcaggcagtgagtgcagatgtgactaacttcggggccaaatttaacaatcatcaggtcgatattattggtgcgccagcagcagcttttaaacctttagagttacaaaaaggcttaggtacaaaaggggcaattgtaaactatccaatcttacaggtgaccggaaatattattattcgtccagacaaattcccagctggttttggtcagaaatctagagagtgggtggctggtcagttaccgcgtgcttttactatcttgggtaaaatgaaagcggatattccgcaaaaatattggatggaagtaccagctgccgataaaccgggttatcaaaagctcatgcgtgaatcacgaattaaccttacacaacgcggggtgtatgataaacgcatgatgaaactactatggcaattccgttgtaagcaagacgcgaaaaactttgaatgtggcttacaagatgagaattacaaataatcttgataaaaatactcaagattcgctttaaacttcgaagacagaccctatattgattatgctatactcaatatagggtcttttttattttgaaaggcacagcaaaatccgaggaacaatcatcatgaatgcccaagctctagttttgacagataatgctgccaataaggtacgccaactccgtgatagtgaagggaatgacgatctcatgttacgtgtatatgtaaccggaggcgggtgttcagggttttcatacggcttcaatttcgccgaaagcgtaaatgaagatgatgctgaatttgtaaatggcgatgtaaagatgctggttgactcgctcagctatcaatatttagttggctcagtggttgattatgttgaaggccttgaaggttcacgctttattgtgcagaacccgaatgcgacaacaacctgtggttgtggttcttcattctcaatttaaaaagaattttaaataaaaaaaacctctctatgatgagaggttttttatttataagattatgcttgatcatgtatagattctaaaaagcattgtacgagttcaggggcattttgataaggaatccaatgagaggcatccataaaaatagccttataattatttttaaaataacctgaatttaacttggcacttttttctgttactgcaatatcatgcttaccccaaataaaaagagtgggaacgtctattgctttaaaaggattttcaggtttgtcccaaaaaaagccacgataccagtttaatgccgtagttagcctattttcttttataaactcagtctcgaatatttcaatttgctgctcggtcatgccagatgacttaagaaagttacggcctaatttaggcatctttttaaataaaagttcgggcagaataggaagctgaaaaactgcaaaataataagattttagtagttgattgctacttaagcaggcttttaaaaaagcagcttgatggggtacggaaactaaagtgagatgttgaatatactgcggatacttcatagctacactagacgcaattacagaaccccaatcgtgcccaattaaataaactggttgaccaagtcccttaataaaaactacgacatcttcagttagttcacttaaagcgtaatgaaagcggctttgtggtctagcatttagactataaccacgttgatggatcgcaaatgttctaaattgatgctcatgcaataattccgaagtctgctcccaactatgggcagtttctggaaagccatgcaataaaaccacgagagggccatctatagggcctgaatcaatgacatcgaatgtccaagccccacgtgtgtattgatgaatacgtttggtcagatccataacaatatgccttacttatttttgttggcatttatcatgaatttttatgaccaatttaataacagcatttcgggtcaggaaatgtgttatgaggtcgaatcagtccaattaaatcgaataagtagctttataccgccgtgatcgtgcctaagattctaaaatctgaagctcctgttaccgcaggtaaattaccacttaaaccatccacaaaacgcattgctaaccatgcaaatgctgtagcctcaacccaagtaggggagagtcctaaaacatcagtggtttgaactgaccaattgtgcttacgtaagcgccaacgtaattgttctaacaaataggagttataagctccacctccacatacataaacttcacctgtttccatattagaacgatagatcgctttttgaatggcacgtacagtaagttttaataaggtagcttgaatattttcaggtgtatcttctaactcatcataagttaaatcattacgccaatcgattaactgatcatctaaccagtcaatattgaaatcttcacgtcccgtacttttaggtggctctttagaaaaatactcatgagcataaagacggtcgagtaaagagcgaataggatgaccataagctgcccaatcgccattttcatcatatggatgacctgtatggcgatgacaccatgcatccatcaaaatattggcaggtcccgtatcaaacccaaatacgctgtcaggattattggcaggcaacatgctcacattggcaatgccacccaaattcaaaatcacccgatgaatgcttggatgttgaaataatgcctgatgaaatgcaggcactaatggagcgccttgaccacctgctgccatatctctacgacgaaaatctgaaacgaccgggatttgagtgatctcagtaataatgtttggatcgccaatttgtagcgtaaaaccatgctctggacgatgacgaatggtttgtccatgcgacccaatcgctttaatttgactacgatctaattggtgcttttcaatgagagaattaatcccatgaccaatcattttggctagagcaacatcagctttacccatgcggtcaatttcattgtcatcgggtaaagttaatgccataagctcatcacgtaactcgggttcgaatggaactgtaagtgtggcatgaagctgtagaggctcaaatgaagccgcaacaatatccacaccatccatactagtgccagtcattacgccgatatagattgcgctcatatgcaacttcccctgcaagacgctgaaaaaatgttagtatatcgcacaaattgaataactgatgtgtttaggttttgtgatgtcaaatttcttgcccgccgaagaacagcttgccctcatccaacgaggcacgcacgaaattatttcagaagaagatttactgaaaaagcttaaagagaatcgtcctcttaaaattaaagctggttttgaccctacagctccagatttacatttaggacatacggttcttattaacaaactaaaaacgtttcaagatttgggtcatgaagttactttcttgattggcgactataccgccatgattggtgacccaacgggtaaaagtgcaactcgtccgccgttatcacgcgaacaagttgaagctaacgctaaaacttatcaagaacaagttttcaaaatcttagatccgaataagacaaaagtacgttttaattcagagtggtttaaccaaaagtctgctgcggatcttattcagttggcaagccagcaaacagtatcacgtatgttagagcgtgatgacttcactaagcgttataacaatcatcagccaattgcaattcatgagttcttatatcctttagttcaaggctatgactctatcgcacttgaagcagacgttgagttaggtggtacagaccaaacctttaacttacttatgggccgtacattacaaagccgttatggccaagaatcacaagtatgtatcactgtaccaattctagaaggtttagatggcgtaaataaaatgtctaaatctttaggtaactatattggtgtttttgatgcgccaggtgcaatgtaccaaaaagtattatcaatgcctgactctttaatcgaacgttatttcgatttattaagttttaaatctctagatgagatcaaagctttattagatgaaatcgcggctggtcgtaatccacaagaagtaaaacgtattcttgcactcgagttggttgaacgcttccatgatgctgaagcagctgctaatgctcataagagtgctggtaaccgtattacagaaggtgaggtgccggcagatactcctgaagtaactatttcacgtggtgagtttggtggtgaaatctttattgccacgattcttcgcgtagcaggattaaatccaaatgcagcagctgcaaaagatgctgttgcacgcggtgcagtaaaagtagactggaatgtagtagatgcaagtttctctgtaaaagaaaacgggactttcattattcagtctgggaaaaaagcaattgcacgtgtaactttcactgactaaaagttatgtagtgatagaaaagcaggagtaatcctgctttttttattttagaaccataaaaccaattaagcgttccacgtggaaccatctaagtattattaagaataaaataaattaaaaaataagaagaaatataaagtgagggtagagtatttactctaatatttctttggattctttggattctttggattctttggattctttggattctttggattctttggattctttggattctttggattaaaaagcttatagaggaataaaaaccatataaaagactccctaacttcaaaatgattatatagctaaagataaaaaccaataaaaaaatagcaaaaatgcctaaaaaaagccatatatatcacttttttcgcaaaatagtagaaaaaaacggcactcaagtgaaaaagggataaatacccttggcaagggaatgagatggtctataatgcacatccatcggcggtgatgcagatagaaacttgttgaaaaacagttacttgtgattagattggttgctttaagtgatgaatttgatggtaagttggtttagagaataagttttaaaaatatcgaaattacctgttgacttttaagagattaagagtaatatagtcgacctagcttgctggtgacgaaccagtaagaagatcattaagagaattgaagaacaacttgtgtggatttttactgattgattaatcgaaataattttcattgattgattggtttaaattactcgaagtttatttgagcgaaatttaagtcagtaattgatgagccagaattggtaccttgtctataaataaggtacaaaatgattttaactgaagagtttgatcatggctcagattgaacgctggcggcaggcttaacacatgcaagtcgagcgggggaaggtagcttgctactggacctagcggcggacgggtgagtaatgcttaggaatctgcctattagtgggggacaacatctcgaaagggatgctaataccgcatacgtcctacgggagaaagcaggggatcttcggaccttgcgctaatagatgagcctaagtcggattagctagttggtggggtaaaggcctaccaaggcgacgatctgtagcgggtctgagaggatgatccgccacactgggactgagacacggcccagactcctacgggaggcagcagtggggaatattggacaatggggggaaccctgatccagccatgccgcgtgtgtgaagaaggccttatggttgtaaagcactttaagcgaggaggaggctactttagttaatacctagagatagtggacgttactcgcagaataagcaccggctaactctgtgccagcagccgcggtaatacagagggtgcgagcgttaatcggatttactgggcgtaaagcgtgcgtaggcggcttattaagtcggatgtgaaatccccgagcttaacttgggaattgcattcgatactggtgagctagagtatgggagaggatggtagaattccaggtgtagcggtgaaatgcgtagagatctggaggaataccgatggcgaaggcagccatctggcctaatactgacgctgaggtacgaaagcatggggagcaaacaggattagataccctggtagtccatgccgtaaacgatgtctactagccgttggggcctttgaggctttagtggcgcagctaacgcgataagtagaccgcctggggagtacggtcgcaagactaaaactcaaatgaattgacgggggcccgcacaagcggtggagcatgtggtttaattcgatgcaacgcgaagaaccttacctggccttgacatactagaaactttccagagatggattggtgccttcgggaatctagatacaggtgctgcatggctgtcgtcagctcgtgtcgtgagatgttgggttaagtcccgcaacgagcgcaacccttttccttacttgccagcatttcggatgggaactttaaggatactgccagtgacaaactggaggaaggcggggacgacgtcaagtcatcatggcccttacggccagggctacacacgtgctacaatggtcggtacaaagggttgctacacagcgatgtgatgctaatctcaaaaagccgatcgtagtccggattggagtctgcaactcgactccatgaagtcggaatcgctagtaatcgcggatcagaatgccgcggtgaatacgttcccgggccttgtacacaccgcccgtcacaccatgggagtttgttgcaccagaagtagctagcctaactgcaaagagggcggttaccacggtgtggccgatgactggggtgaagtcgtaacaaggtagccgtaggggaacctgcggctggatcacctccttaacgaaagattgacgattggtaagaatccacaacaagttgttcttcatagatgtatctgagggtctgtagctcagttggttagagcacacgcttgataagcgtggggtcacaagttcaagtcttgtcagacccaccatgactttgactggttgaagttatagataaaagatacatgattgatgatgtaagctggggacttagcttagttggtagagcgcctgctttgcacgcaggaggtcaggagttcgactctcctagtctccaccagaacttaagaaaagttcggattacagaaattagtaaataaagattgagatcttggctttataacttctgtgatttcattatcacggtaattagtgtgatctgacgaagacacattaactcattaacagattggcaaaattgagtctgaaataaattgttcactcaagagtttaggttaagcaattaatctagatgaattgagaactagcaaattaactgaatcaagcgttttggtatgtgaatttagattgaagctgtacggtgcttaagtgcacagtgctctaaactgaaatgttgaagttactaacttgtaggtaacatcgactgtttggggttgtatagtcaagtaattaagtgcatgtggtggatgccttggcagtcagaggcgatgaaagacgtgatagcctgcgaaaagctccggggaggcggcaaatatcctttgatccggagatgtctgaatgggggaacccacctactttaaggtaggtattgcaacatgaatacatagtgttgcaaggcgaacgaggggaagtgaaacatctcagtacccttaggaaaagaaatcaattgagattccctcagtagcggcgagcgaacggggatcagcccattaagttatgtgtgttttagtggaacgctctgggaagtgcgaacgtagagggtgatattcccgtacacgaaagggcacacataatgatgacgagtagggcgaggcacgtgaaaccttgtctgaatatggggggaccatcctccaaggctaaatactcctgactgaccgatagtgaaccagtaccgtgagggaaaggcgaaaagaacccctgtgaggggagtgaaatagatcctgaaaccgcatgcatacaagcagtgggagcaccttcgtggtgtgactgcgtaccttttgtataatgggtcagcgacttatattcagtagcaaggttaaccgtataggggagccgtagagaaatcgagtcttaatagggcgtttagttgctgggtatagacccgaaaccaggcgatctatccatgagcaggttgaaggttgggtaacactaactggaggaccgaacccactgtcgttgaaaagccaggggatgacttgtggataggggtgaaaggctaatcaagcctggtgatagctggttctccccgaaagctatttaggtagcgcctcggacgaataccatagggggtagagcactgtttcggctagggggtcatcccgacttaccaaaccgatgcaaactccgaatacctatgagtactatccgggagacagactgcgggtgctaacgtccgtagtcaagaggaaaacaatccagaccgccagctaaggccccaaaatcatagttaagtgggaaacgatgtgggaaggcatagacagctaggaggttggcttagaagcagccaccctttaaagaaagcgtaatagctcactagtcgagtcggcctgcgcggaagatgtaacggggctaaaactatgtgccgaagctgcggatttgacattagtcaagtggtaggggagcgttctgtaagccgatgaaggtgtattgagaagtatgctggaggtatcagaagtgcgaatgctgacgtgagtaacgacaaaacgggtgaaaaacccgttcgccgaaagaccaagggttccagtccaacgttaatcggggctgggtgagtcgacccctaaggcgaggccgaaaggcgtagtcgatgggaaaatggttaatattccattacttctgtgtaatgcgatgagaggacggagaaggctaaatcagcctggcgttggttgtccaggtgaaaggatgtaggcatgtatcttaggcaaatccggggtactctatgctgagatctgatagcaagctgtacttgtacagcgaagtggttgatgccatgcttccaggaaaagtctctaagcttcagttacacaggaatcgtacccgaaaccgacacaggtggtcaggtcgagtagaccaaggcgcttgagagaactctgctgaaggaactaggcaaaatggtaccgtaacttcgggagaaggtacgctgttgttggtgatggaactcgcttcctgagctgacgacagccgcagaaaccaggccgctgcaactgtttattaaaaacatagcactctgcaaacacgaaagtggacgtatagggtgtgatgcctgcccggtgctggaaggttaattgatggggttagcgtaagcgaagctcttgatcgaagccccagtaaacggcggccgtaactataacggtcctaaggtagcgaaattccttgtcgggtaagttccgacctgcacgaatggcataatgatggcggcgctgtctccagcagaggctcagtgaaatcgaaatcgctgtgaagatgcagtgtacccgcggctagacggaaagaccccgtgaacctttactgcagcttgacactgaactttgaccttacttgtgtaggataggtgggaggctttgaagctggaacgctagttccagtggagccgtccttgaaataccaccctggtaatgttgaggttctaactctgtcccgtgatccgggacgaggaccgtgtctggtgggtagtttgactggggcggtctcctcctaaagagtaacggaggagtacgaaggtgcgctcagcgtggtcggaaatcacgcgtagagtataaaggcaaaagcgcgcttaactgcgagacccacaagtcgagcaggtacgaaagtaggtcttagtgatccggtggttctgtatggaagggccatcgctcaacggataaaaggtactctggggataacaggctgataccgcccaagagttcatatcgacggcggtgtttggcacctcgatgtcggctcatctcatcctggggctgaagcaggtcccaagggtatggctgttcgccatttaaagaggtacgcgagctgggtttagaacgtcgtgagacagttcggtccctatctaccgtgggcgctggaaatttgagaggatctgctcctagtacgagaggaccagagtggacgaacctctggtgtaccggttgtgacgccagtcgcatcgccgggtagctatgttcggaagggataaccgctgaaagcatctaagcgggaagcctacctcaagataagatttccctaggactttatgtcctctaaagagccgttcgagactaggacgttgataggttggatgtggaagcatagtgatatgtgaagctgaccaatactaattgctcgtgaggcttgactatacaacacccaagcagttgtatatgaagcatcaatcgattcttaaatatgcaagacaacttgatttagttatacctctagctaaaatgaacagataaagtaagattcaattcagcccagtctgttacagatttggaaaacgcttcggcatcaagtaagacccaagcaagtatccataaacagttgtgctggcgaccatagcaagagtgaaccacctgatcccttcccgaactcagaagtgaaacctcttagcgctgatggtagtgtgggattacccatgtgagagtaagtcatcgccagctcattattctaaacaccccaatctcaaaagaggttggggtgtttttttattgcaggtaaatcaaaatattatggaagtgttgtgttataaacaataagaaaattatatatttaaatatgcagaataagggggtaagtacctatgataatctatggtgatgtagattcaggtaattgttataaaatcaaactgttactatccctattaaatatacatcatagatggattcatgttgatattttaaataaagatactcaaacagcagagtttctatctttaaatcctaatgggaaaatacctgtattagttttagatgatggacgggttctaagtgagtctaacgctattttaggctacttggctgagggaacggaattgattcctgcagatccttatatgaaggcaaaaatgtatcaatggatgttctttgaacaatatagccatgaaccatttattgcagttgctcgttttattaataaatatctaggattaccgccagaaagaatagaggaatatcataaattacaacccaaaggccataaagcattatctattatgaataaagctttagtagggcacgactatcttgttggaaataaatttacaattgctgatattgctttatatgcatacacgcatgtagctgaggaaggcggcttcgatttaaagttatacccaaatattcaagaatggtgtcaacgaattcaaaaatatccaaaatatgtgagtatggttgaataaaaaagaactcttatagagttcttttttatatggggaagatcaaaattctgttttaatttagaaatgtgcttctaagcccacataaggccctttaaattcaaatttaaggtcattgttatcgtaatcatctaaatcgatattgaggatacgataaccagctgttaagcctaaatcgattaataaattatcggcaaacttatactttgcttctactaacgcatctgtaatttttgcatcatcaaagtttgtatatgttgcttcacctttagcgcttaaccctgtaaatggaagttttacttcacctgataaataagcaatcggatatgtcttatcaatatctacacgtttaccggtataggcagtaatatctccatttagtacagttgcaccaagacctgcatctacactgacaatattatctagtaactcatagtagagaataaaatcactatgatctaaatcaacgttatagttagcttgacccaaagtttctgatttagtttgagtatctaaattaacataacgaatttttgcatttggaataaatgggattgggtgctcaaaagctaatgaaagttgagcactaccttttcggtctagatcttgatcttcaggagattgtgaagacatattagctttgccgtcataaaaccagtagccaacgtctccttttacgcctataaaatctgcttgtgcgaatccgctaagacccatcccgagtgctaaaaaagacagttttaatattttcatcatcaatcctaaaaaaaagaaaatctttgaacgcatgatatagatatctttgcagttatgcattgatgaaaaattgtgaatataaagcttctatatcttcaatttttaatattcttttatttaattgattttcatataaaaattaataacttatagtgatttgagttttagaggttttagtataaattttgtgtaagtgatcgataatactttgatattttactcatctacaaattagttgatatatctactttatggatgggaataaaattttaatggtagaaaatatcattgaatgtaagaaggtaataatatgctttaaaacaggaatattagctaaaaaataaccaatctagataagaatctctaaaaaaacgtaaattttcagacggaaattacagtaaaaagaaataaaaacaggtattgttcagctatataggggcaaaaaatggacaaaaatctttaaggaagaattttctatttttgcttgtttgttaagggaataaaaatactcaaaaggtgcattttattttctacaaacacaaaagtattttttggttctttttttgcatgcggaataacaatcaacaatagcagtaaaaataagtaatcttttaacattaggtgttctatgacagatactcgtgaaaactggacgtcacgatctggttttattattgcagccgttggttcggctgtaggcttaggtaatatttggcgctttccatacgttgcgtatgaaaatggcggtggtgcgtttcttattccctatctattagcactcattactgctggtttaccgctattatttttagattatgcggtaggccatcgtagtactggttcacctcctaaggcatatcgtgccttatttaaaggtggtgaaacattagggtggtggcaggtttgtgtctgtatcatcattggtttgtactatgcaagtgtacttacatgggctggtagctatgtttacttctctattggtcaaatgtggggaagtgatccggaaggtttcttctttaatacctatttgcagaccacaaaagcaaccggctttgatctacagtttgtaggtcatttattctggccgattgttgggatttgggcacttactctcatcattctttatggtggtgtgaaaaaaggtgtggaattatcgaataagattttcatgcctttattattcattctcttcactattttagttattcaatcgttacgtttaccaggtgcggtacaaggtttaaatgcattctttacaccgaactggtctgcaatgatggattataaagtttggttagctgcctatggccatactttcttttcactctcagttggtttcgggatcatggtgacctatgcatcctatttaaaaccaaaaacgaatttaactggttctggtttaatcgttggttttgcaaatgcatcaacagagattttagcgggtattggtatctttgcagcgcttggctttatggcacatgccgcaggtactgaagttaaggatgttgtgagtggcggtatcggactcgcatttattgctttccctaaaattatttcaagtttaggttctggtgctgatctattcggtcttttgttcttctcttcattatttgttgctggtatttcttcaatggtcagtattttggaagtgcctattgcagcaatgcaagataagttaaagtggggacgtaagaaagcggtaacgattattggtggtggtagtgcactggtttcaattattttattctcaagtgtaaacgcaattaagctcgttgatattgttgatcactttattaataacattgggattattggtggggctttattatcaattattagcgtagcttggtttaaacgttcagcacttaaagagcttcgcgaccatgtaaaccgtatctcaaccattcaattgggtaaaggctgggacttcactttaacagtcattacctctttaatcttattaacaacactctgtatgactgtttttaatttgatcaaaaatggctatgatacttatagtatgagcttacaaggtgtcttcggctggggcagtgtgattttctgtgcagtcgttgctatcgtgttaagtaaaatgaaagatcgctaggaggataaaataatgaatacttcggcaatcgtgatgttaataatttcgatggtatttgtatggggtggattagcactatccatcttacatttaacaaaacatcctgaagagttagatgaagttttagaagaagtaaaagatcagcatacgctttgatattctgatctagtaaaaaagcaggcataacgcctgctttttttatgtaatcttttgaattttacaataataaaatccatcaccagattgtgcttctggcaacagttgtctgccatgaacttgttcaattccccaatctgcctcgattttcacttcttttgcatcaggatgttctgtgaagaagttaatcatctgctgttcgttttcagattttaaaattgagcaggtgatataaagcaatgtaccgccaactttgagttgctgccacatgtgctctaagatctgcttttgtagctcaatggtttgggctatgtcactagattggcgcaataggcgtatgtcaggatgacgtcgaatcacacctgtcgcagaacaaggagcatcaagtacgatacaatctacaggttgaacaggagtccacttggttgcatcggctgccaaaatttccgtatgactttgatcgagtgctaagcgatttaagttttcagtcacacggactaaacgactggggtcctgatcaatggcgatgagctgtgctggtttaaacttttcaagcaaatgagccattttaccccctggggcagcacaagcatcaataaccgttttattgtttaaatcaggcaacaaggtggcacatagctgtgcatgttcatcttgtacagagaaccagccttgttcaaaacccggtaactgagtgatttgtacagattgctcaaggacaataccagcttcggaaaacaaacacgcacgtgactgaatgtctaaactttgtagttttgctaaataagcatctcgaccaatatgacgctggttcacccgtaaagttaaaggcgcggcttgctttaacgattggcagagagcttctgtttgttctccccaatccttttttaaccgtttaaaaagccaacttggtaagccatgtgcttgctgtaaaccttgttcaaagtcttcagtttcacgagttgctcgacgcaaaattgcattaacaataccactgagtgcagggaaaccaagttgtttagttgcatcgactgtttccgagatggcagcgtgcgctgcaatacgcgtgcataaaacttgataaaggccaacgtataggcaggtttctacagtctcattgtttaaaggtttgctgagtaaaggcaggctaattaacttaagtgcgaaccattggcgcaatgtacctaaaacaagttcatgaaatagtgcacgatcacgctctgctacttgattcagctgtgtatttaaaatactagcgagcgattgaccttgctgaacttttagcaaggtctggacgacttgagcgcgcaggttaaaacgtgatgaatttgaagtaacctgactcatggcagaatctgtcctacgtgaagtttttgagtttgtgcaatttgttgagcatttaatgctttaccacccggccactgcacactcgttaaacaaataaatgtattttcaccgcaagcaacatgtacgccctgtttatcgattgcaataatttcaccagctttagcatctgctttattttgattagaaattgttgaataccaaacacgcagcgcattattttcatcaagttgaataaaggcaacaggccatgggttgaatgcacggatattgcggtcaacttgaactgcattcatagaccaatcaatacgagcttctgatttcacgagtttatgcgcatagactgttaagctttcgtcttgaacttcgcgttctgctaaatatttttgtagagtttcttctgactcaagtaccgcacaaattgctgttgcaccttgagctgcaagtttgtcatgcaacgtcgctgatgtatcttcggaagtgattggacaataggttttatacatcatatcgcctgtatctaaacccgccgccatttgcatgatggtgataccagtttcgtcgtcacctgttgcaattgcacgctgaatcggtgctgcaccgcgccagcgtggtaataatgagccatgaatatttaaacagccatatttaggtgtatcgagcacagcttgtggaagaattaagccatatgctgcaactaccatgacatcagcgcctaaagcagcaagttcttgttgagctgccaagccttcttcagttgaagctttgaagtgaagtggttgataaacaggaatattatgttccagcgcaagctgttttacaggagacggtgttagtttttgtccacgacctgctttacggtctggttgagtataaaccgcgataatttcatgggaagtttttagtagagccgccaatgctgttgcagcaaattcgggggtgccagcaaaaataattttcacaaatgcaatccaaaaaaagtttaacgctagtatacgtgaaaaacgattgaagccctaaatcgaagtacaaaggagagctaaagccataaatagtgaacaaaaaattattcaaaaacttttattgataaaaaaaggttataaaaaataaaaaattattcatgtaagttttgctaaatattgactgagtattatcgttcttggctttcccaatattatttgcttctatagaatggagaatgatcaaattatgatgatgagtcaatattccgactgatctaacgctatatcagtatcattcagccagagtggaagtcatttcactcaagcacaacttgttggaaacacaaatgcctgactatcgttcaaaaacatcgacacacggaagaaatatggctggcgcacgtggcttatggcgtgcaacaggaatgaaagatgaagatttcggcaaaccgattattgcagtggtcaattcatttacccaatttgttccgggccacgtccatctgaaagatttaggacagcttgtcgcggcagaaattcaggcagcaggtggtgttgctaaagagttcaatacaatcgcggtggatgacggtatcgcaatggggcatgatggcatgctttattcattaccatcacgtgatttaattgcagactcagttgaatatatggtgaatgcacattgcgccgatgcgatggtatgtatttcgaactgtgacaaaattactccgggaatgttgatggctgcgatgcgtctaaatattcctgtggtgtttgtgtctggcggaccaatggaagcaggtaaggttaaattccgcggtgatgaaaaagcaattgaccttgtagatgctatggttgttgcagctgatgacagctacacagacgaagaagttgcagaatttgaacgttcagcatgtccaacctgtggttcgtgttcaggtatgtttactgcgaactcaatgaactgtttaacagaagcgctaggtttatcgttaccaggcaatggttctatcgttgcaacgcatgcaaaccgtaaaaaattattcttaaaagcaggtcagcttattgttgaattggccaaacgctactatgagcaaaatgatgcaagtattttgcctcgttcaattgccactaaagctgcttttaaaaatgcgatgacacttgatattgcaatgggtggttcaaccaatacagttctccacttgttagctgcggcaaatgaagctgaagttgactttacgatggatgatattgatgagttgtcacgtcgagtaccagtgctttcaaaagtagcaccagcaaaacaagacgtacatatggaagatgtacatcgtgcaggcggtatcatggccattttaggcgagcttgatcgtgcgaatctacttgatgtatctgtaccaactgtacatgagaaaacattaaaagatgcgttagataagtgggatattatccgtactgaagatccagatgtatatgagttctatcgctcatctccgggtggtgttccaactcaagttgcattctcacaaaaccgttactactcaactttagatggcgaccgtgaaaagggtgtgattcgtaatgcagaacatgcattctctaaagatggtggtttagctgttctttacggcaacattgcgcttgatggatgtattgtaaaaactgcgggcgttgacgaatctattttaaaattcacaggttcagcacgagtttttgagagccaagatgcagcggtagaagcaattttaggcaacgaaattaaagctggtgatgtggttgttattcgctacgaaggtccacgtggtggtccgggcatgcaagaaatgctttacccaaccagctatcttaaatcgaaaggtttaggaaaagactgtgcgttagttacagatggccgtttctctggtggttcatcaggtctttcaattggtcacgtttcgccagaagccgctgaaggcggtgcgattggtttggttgaagatggtgataccatcgaaattgatattccaaaccgtaccattcacttgaatattgatgatgcgactttggcgcaccgtcgtacaattcaagaagcgaaaggttggcatccgaaggaagaacgtaaacgtaaggtatcaaaagcgttaaaagtttatgcaatgcataccacaagtgcagcaaaaggagctgtacgcgttctataaaatattcaattttaataattgagtaggaaacatgcacccattaacacgatgaattgttatcatgttaagggtgcattttttatgtctggtaaaaaaaatccgcttgtagaaaaaggtggtttcagatcattctatgggtttgccataaaatggtgataaaatcttcacctacgcagaaactcgcgaaataacatgacatattttctgcgcgaactcaggtagtcatttttccatctcgactactgtttcaccttgcactatgatcaaaataacttttgatctcgcttaggatttatttttagaggcactactcatgtcactgctacgccgttggtttgaccctatccgatcgagctggttttaccaaaagccatctcgtcaagcggtgttacccacggaaaatggtttaagtatttatttacgacttgatgatgtgtatagctatctggctgttcagcaattgtctcagctagatgaaattttaagtcatgaacttaaacctttaaaaattattatttcccatacggcttctgaacctccaaatagcatgacgcatgaggagtggcagcattattgtttaaatgatgccaaaattttagcaaatcagcaccggtttgcttttgatgagtttccagaaatcccaagtccagaatctttaaaacaagccgctgtcatattaaaaagaaccccactacaaggtcagaacttcttacatttacttgaagatatctttcacatgctttggcaacagcaatatggaaaattgcgtactctacatgccatggcagtcaagcatcaggttcctcagcattttccagaacgtatttttacggatgaacctgttcgagcggcatactttgagtttggtggacgtaaatatcatgcagtagatgatttattacgtttaacccgacgtttaaaacaacaaaagttactgacaggtaatccgatatttttaattaatcatatcgaatggcgtgaacatttgattaatgatgctgaggcgttaaatgaaattcaggctttgcatcctgaacttgatgtatttatcgctttagaagacccgatgagctggttgttgcttgcctatattaaagaagagctcgcagactattatgatattcagctaaaagtttatcctttgagttatcggggccgagactggtttgactggagcttggcaacacgtgtgtctaaacgtaccgaggttgcttttacacctttttgccgacctacagaagaaagtacgcttgggatggcaaagcttttctatagtgtgccggaaaatcagcaacttgatacaattttcactattttgcaggctgtttggacgaaaggaaaagatctatctttccagaagcatttccaacagttacagcagcaactgggtattgagcagttaactgaacaggatatacagtcggttttagcgcaaaatgatgcactttgccaagacaagcatcaacctgatttgccggttttagagttgcgtatcgatgggcaaagctatgtatttaatagcctgtatcgggtttggatgattgaaagtatttttagcaatgttttagaagaaaaatacaaaacggcctcaacttctaattgaggcctactcctaaaaacaagaatagggcaaagcctgttttttccgtagcataaccttgtagggaatcggagataaacagtgacatttctagcaattattatgatggtgtttgcctttgcgggcatgattaaaggcatgatcggcttaggcttgcctgcggtatcaatgggcttactcaccatcgcaatgagcccttttcaggctgcatctcttttaattgttccttcaatggtcaccaacgtctggcagctttttgccgaaggacatgtctgggcttttattcgccgtttctggacgttgctcgcaggtattgtggtgggctcaatatggagttttctacctaccttaagtcaaagtcatggtcaaagtagtgaaattttattaggctgcatgttggccttatatgggctttatggtctatgtgtgaagaaacttccgcatttaggaaagcatgagcgctggttatcacccattattggatatatcggtggggcagtgactgtagcaacaggcgttattattattcctattgtgccgtatttgcagtctttgcatttaaaacgtgatgagttggtacaggctttaggattaacgtttacggtctctaccatttgccttgctgtgtttttacaccataacccgatgtcagggataacactggactatcgtttatctttcgctgcgttgttggctgcgctcattggaatgtggatcggtaaaaaaatccgctatcgactgaatgagcagatatttcgccgtatcttttttataggcttgatgtcattaggactttatatgattttgcattaagtcaatttttaaggacgatgctgcgataaaaagtctgcaaactgttggtaactactgggcaactgattgaaactttgtgtggccaaaagtagtttacggtttgcccatgcgcctagcagttgaattgaatggaaatcatagtctgattgtaggcgctgtgcagcacgggcaggcataatcgcaattcccacacctttggcgactacctcggcaattgcgccaaagttaggtaagcgcaaccgatactgtatgttaaaacctaataatttggcttgggtttcaatggactgttgtaaagagtgatgcgatttgagtccaataaaaccatagcttaaagcatctactaaatttagctctttgtagcggactagctcatgtgtcacagggcaaataagaactaatgggtcgcttgcaaactctttagtttgtaaatgtcgggtattgaaaaaactcgagactaggccaagacttgcaatcccttgggttaatgcatctacaatttctgaactttctgcttcatgcaaatcgatattcatttcgggatgaagcactagatattgcggtaataacgtaggtagatattcactttgagcggatgagttacaccaaagtgttaatgcttctgttgtcggctgtctgaaccgctgcatttcttgttcgagttgatctttttgagctaaaagctgacgagcatgttctacaaatgcatgtccagctgtagtgagttctacacctgtggtttggcgaataaataatggggtttcaaaatactgttcaagtttttttatacgttcactcgctgcctgaagtgaaatcgcagagcggtcagcgcctttggtgaggctaccagtcgagacaatatgaagaaccagctgtaaatcaaaaaaatcaaaacgcatgataggaacgtattgaaatgcaaaaattcatcatactaaatcggaatgaaaaaaggcagcttgcgctgccttttagaatttaggttttatcttttaaactaaacagccagtttaaaataatggctgcaaacgttgctgtaccaataccacctaaattgaaattaccgaacaataattcaaagtttccagcacccaaaataatggttactgaagccacaatcagatttttattgttagaaaaatcgactttgttttcaatccagatttttgcaccggcaatggtaattaagccaaataccacaatagatgcacctgtaaggactgcacttggaatggtactaatgacagcgccaaattttggtgatagacctaagaaaatagcaaagatgcctgcaatcacaaatacaatggttgagtacacacgagtgactgccatcacaccaatgttttcaccataagttgtcatccctggcgcgccaacactaccagaaagtgtcgtagctaaaccatcagcgacaaaggctttgcctaattgtggagttaggttttctccagtcattgcacctaccgctttgatatggcctaagttttctgctactaaaatcagtgcaaccggtgcaataattaaaatagccttagtatcaaaagtaggatgtgaaaagcttggaataccgaaccacgaagcttgtgagatctggctaaaatcgatcggtttacctaaacctagaccatttgtcgcaatcgcatagattacataagccaagatcaaacctaccaatagaagtagacgctgcaataagcctcgtgtaaaaactgcgatactgcccatacaaagtacagtaattaaggccatccacatttcaaaaggttggcctgcaacgcctttaatggtaacaggggcaaggttgagaccaataatcatcacaattgcgccagtcaccacaggcggcataagtttttcaatccagcgtgtacccgtgagcatgacaataaaaccgatgagtgcataaaagataccgcacgctacgatcccgcccaacgcaatagaaagatttggattggcacctgaacctgtgatatgccccgtggctgctgcaacaacaccaataaaggcaaaactcgatcctaaataactaggaacacgaccacctgtaattaagaagaacaggatggtacagatacctgacattaaaatagcaaggttagggttaaagcccatgagtaaaggtgctaaaacagttgctccaaacatggcaaatgcatgttggatacctaaaatagcactttgaactggagggagatattcattggtggagaccggtcgatggtcaacatcaccttggtaaggctgccatttgggaaaccagttggacataaaataagctcattattctttaattggtgcaatgatactctttcttgtaaaagcatttaatctcttgtattgaatatgaaagtgaaaagtaattattttttaacgatcggtataattttataaattctaaatataaggaattaggtgtttttttctgataaaaattaattttatgatttttaaaaaaatattctaaaaaatgaaaaatcgaggaaaatttgataaaaacaaggaattttgcaagtaaaaagcagcacatccgagatgcactgctttaagaaagtagttagtaaaatgagcttagcctgtattacgtaaaccagcagcaattccggcaatacttaccatcagtgcatggtcaacaggggtatgctctgcctgacgttcagcaagataatcacggcggcgtttcatgagttcagcttgtaaaagatgcaaaggcagtaaatacggtttacgaacttgcatagactgatccaaaacttcattgtcgcttaatagttttgattcatcttttaacgtaagcaaggtttccacagcatcttttagacgttggcgtaactgattgccgagcacttttaagtcttcatcttcagtcaaatgagactcgtaatagagtgcaatattggcatcggctttagacaataccatttccagcatatcaatgagtgtctggaaataaggccattgctgaagcatttcatcaagcgttgctttttgctgatcggcaatcacttcattaatcgccgcacctgtacctaaccatgcaggtaacattaaacggatttgtgtccaagcaaacacccatggaatggcacgtaaagactcgataccaccacttactttacgttttgccggacgtgagcctagcggcaacatttgtaattcaagctcaggagtgacagtccgtaagtacttcacaaaatgcgggttttcacgcactgtttgacgataaaccttcacagaatgatctgtcatacggttcataagttcacgccactcaaccttaggctctggtggtggtaataatgtcgcttcaagcgttgctgcggtatagatttcaagattttgcatggcaataccttctagaccgaatttgaagcgaatcatttcaccttgttctgtcacacgaattgcaccagagattgagcccggtggttgcgaaaagagtgcctgttgcgttggagcaccaccacggctaattgagccgccacgaccgtggaacagagtcaactgtacgccgtgtttacgagcaattgcagtcaactcttcttgagcacggtattgggcccagttagcagacatgaaaccggcatcttttgctgagtccgagtagccgatcatcacttcgtgtttgccctgaatgtgctgcttataccagtgcatattgaacagcgtattcatggtagttgcagcgccatctaaatcttttaaagtttcaaacagaggcacgacacgtaaaggatgctgaatacctgcttctttttgcaataataacacagctaaaacatcgctcggatattcagccatcgaaataatataagcccctaacgactcaggcggttggtcagccaaagtacgcatagttgcaaatacttcttgaacatctgggtgaccaatcaaactaccttctggctcattaatatacttcggtagtagcgggcgtttgctttggagttcctgaataaggaagttttggcgcgcttgttcagtccatgactcaaaattacccagacctaagtattcagtaattgctgaaatggcttggcgatgacggcctgattcttggcgaatatcgagcttaagcagttcaataccaaaacagttcacacggtagataaagtcgagtagttgaccattcgcgatttcaggcagattactgtcaattagagagcgatagcacagcaataatggttgtaacagttcatctttgcttttaatgacattgctgtcatcagcttctaagccttgtaggcgctgagctaaccaatgacgagttgcttttaaacgctcacgtgttgcacgtagatactcacgataaggctctggatgaggactaccaatggcttgaaccatttcttcggaacaagactgaattgatagttcccaacgtaagttttcgatatctcttagatagaggtcggcagcttgccagcgtgataaccacaatacttcttgggtaatttgatgagtaacgttcgggttaccatcacggtctccacccatccaagatgcaaaacgtactggagcaatatgaagtggtaagttttgttggcaattgtcttggaccagttcatttagctcacggataaatttaggaacagcattccaaagcgtttgctcaattgtggcaaagccccattttgcttcatctactggggtcgggcgatgctgtctgatttcatctgtttgccaagctgaactaatttgttgttttaaattggcaagagcattttgtcgttcacgcggagtaagtttttgctgatcaagttgtgatagacaagcattgatatcgtcatatttttgaatcagggtacgacgactcacttctgttggatgcgccgtaagtaccaattcaatcttaagatcacaaatttgctggaacagtttttccgtcgaaatatttttatctttaaactttttaaataagtgaacaaggggattcggggagtttgcatctggatcgaactctgcctgtctgcggctacgtaccacatgatattgctcagcaatattggcaaaattgaggaagtgagaaaaagcgcgggtaagaggcaatagctcttcatcgggcaattctaaaaataattgttctaattgcttttcggcttcagcttgaccatcacgtgcacctttggcaagagcacggatttgctcgatctgattaaacagttcttgtcctgcatgctgttttagggtttcacctaataaattgccaagtaagcggacatcctcacgcagtggcgcatcgatttgctgaaccatgctattttctcctgttcttattcttttcgaatatagcgcgattaacgaacattccaagctttgagcgtaagaaaatgtgaatttttgcttaaaaaataacatttaaatcgcttataacgctttaaaagtcgacatgcacccgttgcaaattttggcaatcggactttggtttaatgccgatatctgagtagaaataaatcaatagcatctcgaataaaccgatctatctcttgagcattcggtacaggaataattctaagtagaaccttgtgatggcgtacaccaagcaataaggtcaaaagcagctctgtttgatatagcggatcatcggcctgaataaaacctaattgagcagctttttgaaaaaactcaactaactgattttgcagacgggtatgggatgcgtcaaaaaactgtagggcgagtggactttgctctgctgcaagttcaaataatacatgctcgagtttaagtgcttcgggggaataaataatctgcaaggcacgtgaacacaccatataaagtgtttgataaaagtctgccgatgcatctaattcaaatggtttagtgcctagagtctcttcacaagtttctgtaatggcacagataaacaggtttgctttgtcttgaaagtgattataaaccgtgagtttagtaacgcccgcttcctgtgcaatcaggttcatgctggtaccgtgataaccggactttaaaaaaatagctttagcggcctgtaagatacgagcacgcttttccagatctttggggcgaccactttgattaactgtttgcacgaaaccctctaataaaactatataaaaataaatacttataagttttcctttaattaatgtaccgtcgggtatattaattaaaaaacaaacaaactatgatgcaaatatattgtgccttaaaaaaccagtttgaataagagcgataagatatgaatctgttaaaacctctcatcatgagtatgatgattgtttgcatggtcacattaacggggtgtagtaaagaggctcctaaaacagaagaaataccctatgtgatggtgacccagccttcaaccacacttcacgaacaaaaaagctatgctggagatgtacaggctcgacaacaaactgccttggcatttcgggtgggtggacaagttacggctcgctatgtggatgtaggtgaccgggttagagttgggcaagtattagcaaaactcgatgtggcggatgcacagctacaattaaatgctgccaaagctcaattagaaaacgcacaggcagcagcaaaaacagcctcagatgagcttaagcggtttcaacaattattacccataaatgccgtaagccgttcgcaatacgatacggtaaaaaatcaatatgatgcggctcaggcagcattacaacaagctcgttctaattatgaagtttctgccaaccagactggttataaccaacttgtttctaataaaaacggtgttattacagcgcgtaatattgaaattggacaggtggttgcagcagggcaagcggcttatcaactggcaattgatggtgaacgtgaagtggtcatcggcgtaccggaacaagcggttagcgagattaaagttggccaagcggcatggataactttgtggtctaaaccgaacgaacgatttgccggatatgtacgcgaagtttctccagctgctgaccagtcccgtacattcacagttaaggtggcactcaaagaaggtcagtctgctattcagctgggacaaagtgcacgcgtattttttagttcgactcaaactaatgtcatgagtgtgccactttcgagtgtatctgcaacagataaccaaccttatgtatgggtggtgaatgcgaatcagaccttacgtaaagtgcctgtaacgattggtgcttatggcagagatagtgtgccggtattatcgggtttaacaccaaatgattgggttgtgattggtggtgtgcacttgctgcgcgataaacagaagattcacccgattgatcgtgaaaatcgtgcagtgaaaattcagggagccaaataaccatgaaatttaatctctctgaatgggcactgaacaataaaggtattgtcctttatttcatgctcttgctaggcattattggtgcaatttcttattcaaaactctcacaaagtgaagatccgccatttacctttaaagtcatggtcgtacaaacctactggccaggggcaacagccaaagaagtgtctactttagttacggaccgtatcgaaaaggaactgatgaccacaggtcagtatgacaagattatggcgtattcccgtccaggcgagtcgatggtgacttttgttgctaaagattctctcacttctgcgcaaattcctgatgtttggtacaacgttcggaagaaggtcaatgacattcgccatgaactcccaagtggtgtgcaaggtccattttttaatgatgaatttggcgatactttcggtaatatttatgtactgacaggcaaagactttgactacgcgcttttgaaagaatatgccgatcgtttgcaattacagctacagagagtcaaagatgtaggcaaagttgagctgatcgggctacaagatcagaaaatctggattgaaatttcaaacactaaagcggttcagctcggtattcctgtttctgccatacaagaagccctgcaaaagcaaaatagcatggcaagtgcaggcttttttgaaactggaacggatcgtattcaaattcgagtaagtggccaactacaaagcgtagaggatattaaaaaaatgcctttactggtaggcgataaaaccattcagcttggtgatgttgctgatgtctaccgtggttttagccaacctgctcagccgcgtatgcgttttatgggtgacaatggtattggtattgccgtatctatgcgtaaaggcggcgatattattgccttaggtaaaaatctggaaactgaatttgcccaactgcaaaaaacattacctctaggtatgaaactacaaaaagtttctgaccaacctgtagcggtacaacgcagtatccatgagtttgtcaaagtacttgctgaagcagtcattattgtcttgttagtgagctttttctcattaggtttccggacgggtttagttgtcgctttttccattcctttggttttagcaatgacttttgctggcatgaatttatttgatgtcgggctgcacaagatttcgcttggtgccctaattctagctttgggcctgcttgtagatgatgccattattgctgtcgagatgatggccattaagatggagcaggggtatagccgaattaaggccgccggatttgcatggaaaacaacagcatttccgatgttgacagggacattaattaccgccgcaggctttttacctattgctacggctcagtccagtacaggtgaatacacacgctctatctttcaggtcgtgacgattgctttattggtgtcttgggttgccgcagttttatttgtaccttatttgggtgaaaaactactacctgattttaccaagacaggtcatcaagcaccttggtatgtccgtttatgggcaagaataactaaaaaaccgcaaccgcaaactgtggccatttcacaggaccaccattacgatccttatcaatcgagtttctatttacgttttcggaaaatggtcgagttttgtgtgacctaccgtaaaaccgtgattgcaacaacggtggggatttttgtgctgtctgtactcatgtttaagatggtgccacagcagtttttcccgccttcaaaccgcgctgaaattttagtcgatttaaaactcgaagaaggcgcatcgttaaccgctacagagcaagcggtgaaaaaggttgaacaattcctgtctaaacaaaaaggcattgataattatgtagcctatgtcggtacaggttcaccacgtttttatttacctctagatcagcaattaccgcaagccagctttgcgcagtttgttgttttggcatcatcgcttgatgatcgtgatgaaattcgccgttctttagaaacccaaattaaacagttgctcccacaagtccgtactcgcgtgtcattactcgaaaatggcccacctgttggttatccattgcagtatcgtgtgtcaggtgaagatttaaatctggtacgtaaagaagcacaacaggttgctagggtaattagtgaaaacccgaataccaccaatgtgcatttggattggggcgagccaagcaagattatttccattcaaattgatcaagaccgtgcgcgacaaatgggtgtgtccagtcttgatttagccaacttcctgaacgcctcaattacaggtagcgcaattgaacagtatcgtgaaaagcgtgagctgatcgaaatccgattacgtggtgataaagctgagcgcgttgaagtagcttcactggcgagccttgcagtaccaacagcgaatggaacaactgtacctttagcccagattgcgaaaattgaatacaaatttgaagatggtctgatttggcaccgtaatcggttaccgacaattactgttcgtgcagatattcgtaccaatttacagccagctaccgttgttggagagttagctgaatcaatggacaagttacgcgctgagctgccaagtggctacctcattgaagtggggggaacagtggaagagtcggcacgcggacaaagttcggtcaatgctggtatgccactctttttggcagtggtcatgacattactcatgattcagctgaagagtttgtctcgggcaacaattgtatttttgactgcaccattaggcttaattggcgttgttttattcttacttttgtttaataaaccatttggttttgttgccatgctaggaaccattgccttatccggcatgattatgcgtaactcactcattctgattgatcagattgaacaagacagacaggcagggcatccaacgtgggaagcaattattgatgcaacagtacgccgtttccgtccgatcattctcacggcattggcagcagtactcgccatgatccctctttcgcggagtattttcttcggtccaatggctgttgcgattatgggcggactcattgttgctaccttgctgacattatttttcttacctgcattgtatgcagcgtggtttaaggtgaaaaaaacagcataaaatacataaattttttgtgaataaaggtgcgaaatattgaaaagtccaatatagtagcacctgtctttacacaaaaaatacaggattatttcgctgcataaaaaataggcataatgcagtgaattgaggtgaaatacagatggggcaagaccatatcgaacagcatcgccgttatattgtaatttcttatgcgttcatgtttcttgcattgtttacggttatttttgcggcctttgcttatctggtcgctcgtaaagtagctgttgtggatgatgcggaagtttggattcatgctcatgcgctatggattatgcgcaatggtattctattcctcctcatgtcagtttttgctgtggtctggtttattcctctcttcttttttgcatgggatagcagcctttgggtaacggcttcaacagttgctggtgtagtttttagtgctattgcttggttatttttattaaatgcatggttaaaaggcttgtctaagtatttaaaaaataaggcagttttttaatatatctgttttttgaaagttttccccttgtaaattcggctaaagccccccatttagtcggcaatagagtattgataaaatttccgtgaggagcaccgccaaacatggctaaacgtgattattatgaggttttaggcgtttcaaaaaccgcaagtgatgatgagatcaaaaaagcctatcgtaaattggcgatgaaatatcatcctgacagaaaccctgacaatgccgaggctgaagaaaaatttaaagaagcttctgaagcttatgagattttatcggacagcgaaaaacgcagcatgtatgaccgtatgggacataatgcgtttgaaggcggctttggtggcgctggtggtggctttggcggtttcagtgcagaagatatttttagccagttcggtgatatctttggtggagcgtttggtggcggcggacgtcagcaacgccaacgtcgcggttcagatttacgctatgtcatggaacttacccttgaggaagctgtaaaaggggttaaaaaaacaattacctttactgctccagcaccatgtgatgtgtgtgatggtaaaggctctaaaaatccaaaagatgtagaaacttgtaaaacttgtcacggttcaggacaagtgcgtatgcagcaaggtttcttctctgtacaacaaacttgtggcacatgtcgtggccaaggcaaaattattaaaaacccatgccatgcatgtcatggttcaggtgtagcagatcgtcagcaaacattagaagtgacgattccagcgggtgtggataatggtgaccgcgttcgtttaagtggtaaaggcgaggctattcgtgatggtcaagctggtgacttatacgttgaagtggttgttcgtgaacacgaaattttccaacgtgatggtgccgacttatatatggacgtaccagtaagcattgctgatgctgcacttggtaaagaaattgaaatcccgactttggaaggccgagttagcttgaagattcctgagggaactcaaacaggtaaattattccgtttacgtggtaaaggtgtgcgccctgtacgtagcagtatggtgggtgatttactttgccgtatcgtggtagaaacaccggttaacctaacctctcgtcaacgcgaattacttaaagaattacaagcatctttcgatggtgaagacagtgcgtcttcaccaaagaaaaaatctttctttgatcgcttattcgattaatgattgattagatcagaaattaaaaagaaggcggatattgataaaatatccgcctttttattgcgctgattcatcttattatttttattttgctttaaagaaaatgactcgtaattattctgtaggatgagcgacatcaatatcatcaacacttacgttgagttgacttgatgcaattggagtcactacagcttcggcagtagcttgaggagctggttgtatagctgcttttactgtttcttcagttttttcttcaatgattggatcaatatcttcaactttaacctcagtagtagcatcgcttgtttgagctgtaggtgttgctgcttgagtatttacgtttgttgtaatacgtgctttagataagctctctaatgtttctccgggctggattgcaggttctgcaaatgccattgaacttattatccccataatgacggttaggccaataattttcgaatgcatgctgaactccttatagtcatctttttttcattcgtggctcagtagtgtgcagttcaattctttaacttttgtgaaaacagattaaattccggttccctttaaaaaatattttttaccttttattgtgggcaaagagttttgatatagtaagccaattacgtaaaacagaagattgggaaggattatgtcagcagctccacgcattggtattttgggtgcaggcggccgtatgggtcgtacacttattcaggcagttcaacaagcaggctatcaattggctgcggcagtagagcgtccagaaagtagtttggtcggcacagatgctggtgaacttgcaggaattggttcagtgggtgtgaaggtttcaggaagcttggctgatgtacttaaagattgcgatgtaatcattgattttactgcaccagctgccaccgcccagcatttaaagctatgtcgtgaagctggggtggctatggtgattggcaccacagggatgtctgatgagcaaaaggctgaattggatgaagcagcaacgcatacacctgttgtatatgctgccaactactctgttggcgtaaatgtatcaatcaagttacttgagcttgcagcaaaagtatttggcgatacagtagatattgaagtaattgaagctcaccaccgtcataaagtagatgcaccatcaggtactgcattaatgatgggtgaagcaattgcggatactttaggccgtaacttaaaagaagttgctgtttatggtcgtgaagggcataccggtccacgtgatcgtcaaaccattggtttcgaaaccatccgtggtggcgatattgtaggggaacatacggtcatgtttattggtgagggtgagcgtgttgaagtgactcacaaagccactaaccgtatgaactttgctgccggtgcagtacgagctgctgcatgggttgtgggccgtgaagcgcgtaaatatgacatgaaagatgttttagggttgaacgacgtacaggtgtaaaccatctgtacaattcccatatgtggcgagaaaaacaagatagagcagaacatgaataaaaaacaaattgctttgaccactcttctttgcttaagcagcctctatacaggggctgcctctacagacaaggctaaactcagcctagaccgtaatcatattaaagtgtggacctatcaaaaagcagataacccagtctttcaatataaagcggaaacaacgtttgatgtacctcttgaacgcgctgtggcggtgattttagatgtagatcgtgcggctcaatgggtgccttatatgggtaaggtccaaatgctttctcaggatgaaaagaaaggcgaattcactttatatatggtgttagattttccttttccgctaaaagatcgtgatgtagtggttaaaggaaaaatgagtaaagcagccaatggcctaattactattaaaaatacggcagttaatagtaactatccgatacaacccgatgtcgtgcgcctaacacgctatgaaggggactggacatttcagaaacttgccaataataaagtcaaagtcaccactagtggctatgctgatccagcgggtgcaattccgttgagcttcgtcaatatgtttgttcaacagcaaccgtatcagatgctgcttaaaatgaaacgggaagtaatgaacccgatttatgagcaacctaagttgccggaaattttaaaataaataagctaaaaaaagcgcctgatctcaggcgctttttttattagtctggacactgttgtaaggtttgagcggggctgctttctcgtttgatttggaataaaaccaataacaaacctaatcccgccagtaaggcgcccgcaaaagatactgcactataaccccaacctaaatcgagtactaacgcgcctgcagcggcacctactgcattacctaggttaaacgcaccgatatttactgaagaggcaagccctggagcttcgtgagcaactgacattacccgcatttgtaatggtggtactaaagcaaaggttgctgcaccccatatcaccaacgcaatggctgctccaatctggctttgagcaagaattgggaaagtcaccatcatcacaatcaacagtaccaagaaaccaatcagagttttgttgatggacaagtctgcaaaacggccacctaaatggttaccaatcgagaaaccgacaccaatcagcaccaacatgaacgtaatgaaggtcggtgaagcatgcgtaaactcagtcaaacttggcgcaatataggtgtagagcgtaaacattgcacctgcaccgagtacggtagtgagtaatgcaagaaccacaggggtacgcgttaatacttttaactcggccttcacgtttggtttttgggcaaccataccttgcggtaatgctttccacaaagcgagcatagtaatgatgccgagcacggaaatcgcaaggaaagacatacgccagccaatgttttgcccaacccatgttgctaaaggcacaccaccaatattggcaatggttaagcccataaacatggttgccactgcactagcctgtttatgcgctggtacaatactagctgccacaacagaaccaattccgaaaaaggcaccgtggttcaggcttgtaatgagacgtgcacctaataagctcatataatttggtgaaaacgctgcaatcaggttaccgaccgtaaagatcgccatcaaaaaaataagcgcattacgtcgtgcaaaaccaccaaaccacagggtcataaacggtgcacctagcattacgccaagtgcatagcctgtaattaacataccggctgttggaattgaaatccctaaatcattagcgatgttcggaagtaaccccattggagaaaattccgtggtgccaatagcaaaggcaccaattgccaatgccaataacgagaacgccgtatttgattgagtgttcatgagtttagtcccaaactggtgcccatggctctgggctaacttcacgactgttacggtcgagttcggcaatcatttgcatttcagccgcagttaactcgatatcctgtgcttttaaattactaatcaggttttcacgtttagtcgaagatggaatgactgcaaaaccacgctgcaatgcccatgctaatgcaatttgcgctgtcgttgctttatgagctgctgcaatctccgctaaaacagggtcttgaagcactttgccgtatgcaagcgtcatgtatgaagtgacatcaatattcttctcttgtaagaaattcacaagtttatggttttgaagataaggactcagctcaatctggttcgttgcaatatgctctacaccaattgtgtcaattgcttgttgggtaagtgcaatattgaagtttgaaataccaatttgtttggttaagccttgttgttttgcttcaagtaaaagctgcatgatttcaggaattgaaacgcctaaatccggtgctggccagtgaatcaaagttaaatcgacatggtcagtacgaagcttttgtaagctctcttttaagcttggaataaacttatcttgagcaaaattatctacccagatttttgtagttaaaaataagtcctgacgtgatacgccactttcagcaatcgcttgaccaattgccgcttcattttcatagatttgagcagtatcaattgcacgataaccgacatctagcgcatttttaacagaatcaatcacagcttgttctttaaggcggaaagttcctagaccaaaacgtgggatattcatgtattcacctgaaattaaataattgtttaacttgaggtgcattttgctttttttattgttgcgaaaaaatagatgaataagcaaaatatctttgatgtttagtcaataatagaataaacgatgaaatcaacaattgaagaacttgttgcctttatcacaattgttgatacaggttcatttgtggcagcagcagaacatttaaagcaaacaccttcgggggtgagccgatctttaacccgtttggaagcaaagttagatgtgactttgctagagcgaacaacgcgtaaattgaaactgactcaagaagggcaacagtttctggtaaaggcccgtaaaattttaaatgagctgaatgcggccgaagaagaacttcaaaagtctgatcaaggtactgccggtcttattcgggttgattctgccacaccgtttgttttgcacgtgattgcaccattaatgcataaattccgtgagtgttaccccgatattgaaatcgaattaaatagcaatgatcaggtgattgacttacttcagcataaaaccgatgtcgcatttcgatttggggaacttaatgactccagtctgcacgccaagttggtatgtaagagccgtttatatattgtggcaagtcctgactatctagctcttaagggaacgccaacacaacctgaagaacttgaacagcatgatttgattggctttactagacctacttatatcaatagctggccaattaaagttggcgatgaatatttttttgcccaatcaaaaattaaagcatcgagtggggagaccgtacgccaactgacgattagaggacacggcattgcgcgactatctgaatttgaaatttggaaagatatggaagaagggcgattgattgcattatttgaagacaaaattgagcatcaatatcaaagcatccatgctgtgtattatcaacaagagcatctaccaaaacgaatccgtttattcattgaatttttggcagaacagttaaaagatggttttaaaaacgctctctaaaggtcgtataactatcggttggaatatgaacttctaaaataggtgtcgtttgtccttctgccgaatgttgagacagaaaatagcttttttgctgttcttggcagctaaaatatagtttggaatagactgaattcaccataacaacttcatttgagctattacgtttatattgataatgagaaatcgcactggtctcgtcatcagtgcgttgctccattttgtagtcttgctggttggtcatttttaaataaccttcaatcaaactttggcaaaccgtgtgtctgtactgttcattttttggttgtggttggcaacctgctaaaacaatagtaaataacaatataacttttaatttcattggcttgctactctctgagttgatttccatagcctaaaggtgttctataaaccagtacagatacagaaatttttaaaaaagcagcacagaatgacttttcaatatcaggttcttgccaatcaattagcacatcgtatttatcaagatgaacttaaacctcatcaaaagctcatttccttacgagattttgcccgtcaacaaggtattagtttaagtacagcaaaaagttgctatgaattacttgaggcgaggggactcatttatgtaaagccgaagtcaggttattttgtggttgctcgtaccccatccagccctattccggatagtccagattttttatctttgcctcgacatgtctcaaatctggagttgcataaccaaattcaggaagctgctttacaaagtcatcttgtacctttgggatcgattcagttaacgccccactttattcctgtagagggtttacgtcgttctattcaacgtgctttaaaaaattgtcagcctcaagattttctttattgtaataaacaaggtcatgaacaattaagaaaagcactatccgatcattggcgtgaagatggcatttatatcgctccggaagatatttttattaccaatggctgtatgccggctttgtctttagtgattcagaagcttactgaagtgggcgatagtattcttattcctacacccacctacaatggtcatttacagttattagcaagtttaaaacgacaaattgttgagattccggcagatcatcgtggcattgatcttgagcgcttagaatctttaatgcagcaaggtttggcgaaggtttgcttaatgacagccaattatcaaaatccattgggatattgttttagcaatgcagagaaacagaagattgctgaattagctgcaaagtatcagtgttttattattgaagacgatatttttggtgaatgtggctacagtagcgagcgaccattacccattcgatattgggaccgcgaaggttatgtgatttggtgtggttcagtgtctaagtctttgtcgagtgcgtatcgagtaggatggttttgtttaacgacaaagttagaacatttaaagcttgaactgctggtaagtaatatcggggtgaatacgcctttacagttaggtttagctgattttatttatagtcgtggttatcgagagcatttagagcagttaagacccaacttgatgcgacaagtcgaagaataccgtagctgtattttaaaagcctttgaagatataccaattgcattgagccagcccgaaggcggatatgcattatggatacagttacctaagagtgtagataatttagcgctctattacactgcacaagctcagggaattacagtggtaccgggccatgtttttggtgaggatgaacgctatcgacatttcattcgtttaaacgcaggccatgagttaactgccgatgtccgccaagcaattatgagcttggcaggctggtcgcgacaacagatgcaaacagtgagttagttttattctgcaaagtctgctttaagcacaatgcggtagcgtgcttgacctgagtgtagacgttcaattgcttcattgagctgtgacattggaaatagctcaatttgaggcgcaatttttttgcgtgcggcaaactttaaaagttggcgtagagcagcaggtgaacctgtaggtgagcctgttactgacttggcaccatcaataagtgaacctacagaaacaggaacaggttctagggtcagtcctaaaaagtgcaaagaaccgtttggtgctagcgtagaaatgaaagcacgccaatttaaagtcacattcacggtactcagcaataaatcaaatttacccttttgagcttttaccgcttctgtatcgcggctattcaccacatggtcggctcccattgctttgagttcttcggttttatctgggttagaactaaacgccgtaatttcacagccccacgcttttaggagcttaatggcgatatgacccaaaccaccaataccaatcacacccacgtgatgtgttgcctgaattttgtgtttgagtaatgggtcaaaaacggtaattccgccgcaaagtaaaggacctgcactttctgggtctaaatcttcgggaaggggaatggcccattgccaaccagcacgaaccttatcggcaaagccacccgcatgtcccacgattgttgcgacattttcgcccgtacaaagaacttgctgaccgccaatacactcatcacaggcttggcaactctcagcggtccagccaataccgacacgttgcccaatttgtagtcctttggcttctgagcctaaagcaacaattcgtccaataatttcatggcctgcaactacagggtacacggttgaacgccattcattatttaaaacagaaatatcagaatgacacaaaccacagtattcaacttttacctcaacctgatgcggttgtaattcacctgcatcaaattggtatgggaccagtttttcacctgcctgcattgcagcataagcctgaatcgtattattgctcatcggaaactccttaagcggatttgaaccgttctggtgggttaggaagctttaaattgacaatcgttttcatggtcattgaccatacccactgcttgcataagagcatagcaggtggttggaccaacaaatttgaaaccattttttttgagcgttttggaaagttttaggctgagctcagtttgagcaggggccttacgataatctgcaacatcattgttttgtggcgctgcatctacaaactgccaaagccatttagaaacatcaccaacttgggctttaagggcttgccaagcaatcgcattatcacgaatagctttgagtttgcctaagtgacgaattaagcctgcatcggatagttttgtttctaaaaagtcatccgtaaatgcggcaatgtcagcaataggatgattaaaaaagtgctggcggtagctttctctttttttcagtacggtaatccaagatagacctgcttgttgtccttcaagacagagcatttcaaatagtcgggcttcgtcgtgttctggtttaccccattcttcatcatggtaagcaatatagagtggatcatcggaacaccatccgcagcgttgagttttcatgatgatgctccttatatttatcttggtattttagagtttgaatggtacccattcatttggacgagtatcccaataatacagttcagcttgagttaagtcttcaaactttagccaaaagtctttgccaactttatctgaaaaaccggtactgatcagtagggcatcatcactgatttccatgatccagccttgatagctattgccatttaaaatgatcttttgctggttgccagactcggcaaactctactaagcgattgatcagcgcttccgacataaaatgttcctagcgtaaatatgaataaggattaacagcaccacgacctttaccatctaagtaaagaccataatgaagatgaggtgaagtataacgtgcattgcccgtgttgccgacatagccaatgaggtcgccctttttgacatagtcacctacgtttaagccacgtttatgtccatcaagatgagcataataatgccatgttcctgccgggcctaaaatccagatgactttgccaccgaggttattattacgaagatcggcaatgagcccttcagttgcactgtacactttggttccacgtggagccaaaatatcaattccttcgtggctacggccctgactccgagcagctccccatgtgtcttttaactcatctcgatcgacaccttttaccggaacaggaagccgacttggaagctgcatactcttgagtttgctaacttgagctggtgaaagcggggcaggttttttaggtgcactggcacaggctgccaatagaataatgagaaaaccaagtgagagatgggaaacaaaacgtcgcacaaaatactccctgtcacagccatatcaaaattattttgctcactatgtcatgaacggcttgtcgagatcaattttttcatagcagttggaacacctttagcaatagcttgttctgggcttaaccattggccttcaagttcaatcgccagatgttctttttgatcaggttccacgtggaacacgtgagcattaagtaaccatgtgaagtgagtaaagctatgactgatctgaaaagtttgtggttgaggttgtagcttaaattgctgacttaatttcaagcgttcatgttcattttctaaaataggtaaacaaaataaaccgccccatagaccatgagcttggcgttgctgccagaaccattcatcttcgcactgaataataagaacatctgccgttttaataggtggtgttttttcggtttttaaaaggtaattcttgttctaaaccttgctgataagcctgacagtgagcttgcattggacaatataaacaaagaggctttttaggcgtacagatggtcgcacccaagtccataattgcttgagtgtagtcatgattgcgttgggtgggacaaagttcttcagcgagtttccacatttcacgttcgtgctgtggtttgcttaagtcatcttcaatggcatagaaacgggctaagacacgtttcacgtttccatccataatcacgccatactgacgtaaacctaaagacatgagtgcacctgcggtcgagcgaccaatgcccggtagtgcaatccattcttctagggtttcaggaaatttgccttgctgtgctacaaggccggcagctttatgcaaattacgggcacgagcgtaatagccaagacctgcccaataaggggctacttcatcccaagttgcatggcctaaagcttctacagttgggaagcgctccataaagcggtcaaaatattgcagaactgtttttacctgagtttgctgtaacataatttcagaaacccagactttgtatggatcatctgcgacttgccaaggcaaatcatgccgaccatgttgatcgaaccagtttaagagggcatcagaaaaagaaaattcaggcatgaacagctatagaagaaaagtaagggctaaattatagctgaaatttaggtgaaattttgtttaaagcaaacgaagaaaatggacatatgaaaacagggactacatcaaaaatgtagtccctgttctatgagtaaaaaggattaatccttttgtacaccccaacgttgatcaagtttcaacggttgatttttgtaatatggaatgacatgaatgtggaaatggtcagaagtctgtccaaacacttcaccatcattaaagccaatatggaaaccgtctggctgatggcgaagctgggtttcatgacgggcaatttcaagaagtgtcagtaagccttggtgctctttagacgtaatatcaaaaaacgagctgacatggcgtagtggagtcactacacagtgacctttagacaacggatttgggtctggtaaaattacagcaaattcattcttatcaatgatgtcatattcatcaaaatcgcaatacggacatttcttgtcagtcattgttgtatcctctcatgttattccattaaaccccgagtgcgggaaataagactaggctttgctctagctcaacgggagtatatttattgaagtatggtttaaaaaatacagtaaaaatattgcaaagtcataaacatttaagggagcaaatgcgaaaaatgccatttgctccaaatttgcttcttttattttaaagtacgttctaataaagcgtacattttagcaaggccttgtttctccgcttcgctgttgtagccaaggtctacaccattcgctttagctctttcatctgcaagcgggttactaaagccatgtttagcatcttttaaaaccactacctcatgtttaacctcagcagcttgcatctctttttcaaaattagcaacatcttctaaggtgaccatgctgtctagttcaccatgtagaaccaatacctcgccttgaatgttgcctttttgagcaggagccttaggagttaatgtaccatggaatgtcgcagttgctttgaggggagcacctgagcgagctagatcgagtaccactttgccaccatagcaaaaacctaccgctgcaagtttttcactatttacttccggttgagcagccaaagtctgaagccctgcgttggcacgatcagtcacagtgtctagatcttcaaatgtctgcatcatccattcataagcttgagctgcagtcgttgttacttttttatcgccatacatgtcaattgcaagtgcagcataaccgtgttcagcaagttcacgcgcacgttgttcagtgtattcgttacgaccccaccactcaggaccaataatgacacctggtacaggtgtttcactttctggagccgcaaagtaaccaattaaatggctaccatctggtgcagtatattgaatttcacgggttttaattgctgtactcatgacattaatcctgaaattaaattcgatttaaatacgcttgattaaagcataaaaaataaaagccatataaataactatgtaaaaaactacatcaaaagaaaagcatagaaatatttatgcaataaaaaaagaaggaacgagttccttctttttgatatggtcatgattaaattaagttcggcctcgcgaaataaaaccaataacagcgagaattacagctatcactaataaaatcacggcaaagtctttagataaccctgcaacaccaccaaaccctaatagactggcaatgagtgcaatcactgcaaaaattattgcccaacggaacatatgctgtcctccttatttttcattgtctttttactatatagcgtgttttttgcacgaaatgtgtcgtttatgtggttgaaatgtatattaaacaatcattttgtgatgccaaaaatacggcttcttttcttaagaccagcgtacttcaatgctataatctgattttgcttgatctatatagccgttaaaatcttatgtctaccgagacctcacttcgtccattgttttggaaaaattatacgctagagcaactgactcaggctgagtgggaggcactgtgtgatggatgcggattgtgctgtttggtcaagctagaagatgaagatacatatgaagttgcgtacaccaaagtggcgtgcaagttacttgattgcaatactggacgttgttctgactacccaaaccgtcagcagcaagtacccgactgtttacaactaacaccggaaactttaaaaaccatacactggttgccatcgagctgtgcctataaacgtttgaatgaaggcaaaaatttaccttcttggcactatttaaatacgggttccagacaaagcgtagtgaaagcgaaaaagtcggtagcagggcgttgtattcctgaaactgatgtacatgaagatgatatcgaagattatgtggtgcgttgggtgcgttaatacgctcccgatgagcatttttaattacagcgtataataaagtaacatttttatcgtaaattttttaatcatctccgttatataaaaataaaagcaaaaggagataaaaatgatgagacgattagcagcccccttattatgtagtagtttcttcttgttaatggcctgtggctctaataatactaattcaaaaaatcctgaacaaaatacaactgcaaaaacagagcagaccagtgctgccaaacaaacttatcaggtcgaggcagtcgcacattttaatgagccttgggcgatcaccagtttgcctgatcagcggttattggtgactgaacggcaaggtaagctaaaaatttttaatccacaaaataaacaagtgctagatgttcagggtgttccagcggtgaactatggcggacagggcggtttaggggatgttgctctacacccagactttgccaaaaatcactggatatatcttagttatgcagccaaagggcaaggtgggtctggtgcagtgatttcacgtgcgaaactagatttatctgatcctaatcagccaaaacttaccgatataaagcagatttggcagcaagtacctaaagtctcaggacagggccattatgggcatcgcatgctttttggtgcagatggtaagctttgggtcagttcaggtgagcgtcaaaagtttgaccctgcccaaaatatgaaaagtaacttgggcaaaattttgcgtttaaatgacgacggttcagcagccttaggtaacccattttatgagcaaggcggtgtcactgctgaaatatggtcacttggacatcgtaacccattaggaatggcctttgatcgtaaaggacagctatgggtggttgagatggggcctaaaggtggtgatgagcttaatattattaccaaaggcgaaaactatggttatccgattgtttcaaatggagatcattattcaggtcagcctattccagatcatcacacgcgcccagagtttaaagcgccagaaattgactggacccctgtaatctcaccgtcgagcttaattatttatcgcggacaacaatttcccgcatggcaaaataaagctttaattggcgggttatcttcagaagcaattgttgttgtagatttagagcataagcccgtaaaagaagtacaaagattagagatgaagcaacgtattcgtgggttacatgaagcacaagacggttcaatttgggtaattgaagatggccccaatgctcgtttactcaagctgagtaagaaaccctcttaatgctaggaaataccctgtaaataaaggatgtgtctcatagattcaaattgtagatttctgtgagacacaatagactatagtgaaaagacgataaagctatttgagatgtcagacacccatattccacttcctgaacgcctgcgcccgagagacttgtctgaaattattgggcaagatcatttgttaggtgaacatgcgcccttacgtcaaatgattgatcaggggcatttgccttctattattttttgggggccgccaggcgtcggtaaaacgacaattgctttgcttttagctcaggcaatagatcgtccatttgtgagcttatctgcgctgaatacgggcgtaaaagaattacgtgaagtgattgcagaaagtggtgacttactgacccctgtagtttttattgacgaaatccatcgctttaataaatcacagcaagatgcattattaggtgccgtagaaaaaggtaaaattaccttaattggcgccaccactgaaaacccgtcttttgaagtcaatagtgcacttttatcacgctgtcaggtctataccttaaacagtttagacagtgaggcaattcagacgctacttaacaatgcactccaaaacgatagatttttaaaagaacgctatattcatattgaagagtatgatgctcttttacagtttgcagcaggtgatgctcgtaaggcactcaatttacttgacttaattgcaagtacttttgagcccgaagttgaaaataccattaccaatgcggttgtagtaaaagtcgctcagcaaaatattgcgcgttatgacaaatcgggtgaacagcattacgacctcgtttctgcctttatcaaatcgattcgtggtagtgatccggatgcggctttgtactggatggcacggatgcttaaaggtggggaagatccggtttttattgcaagacgtatgttgattgccgcttcagaagacattggaaactcgaatccaaatgcactattgcttgcaggtgaatgtttccgttctgtacaggcggtgggaatgcctgaggctcgaattattttggggcaaacagcagtttatttagcgaccagtgcaaaaagtaatagtacttacctcgcaattaataaggccttggaacttgctgagaaaacggcaaatttaccagtacctttacacttgagaaatgcgccaaccaaactgatgaaacagcaaggttatggaattaattatctctatcctcatgactacccagagcactttgtgttgcaagactacttgccacctgagttaaagggaaccaaactctatgagtcggcgagaaacaagcgtgaagttgaaggtgaacgcctacaacaacgcagatggcagcaggaacaatagttttattgtttcctgctattgttccaattcttcagtcacctgaccataaatcagcagggtaaacacgcctgtaccaccaataatattgccaatggtggttggaatcaggaaattaaacagatattcaccaagagaagcttctccttgccagaccagataggacatttcggtagagccaacgaccacatgggtaaagtcgcctagtcctatcagataagtcatgaaaaagatgactaggaacttattgctgacggaaggtagcatccagaccaatgcagcaattaaaagaccagacataacccctttaagcagattttgggtggcggaaaaagacgcaacatgatgtgcgagctcatctagtgctttatcaatgtttggagtaaacaggtcggtggtcaggaagaataaactcgccaaagctgttccaataatattgcatagaatcacgattccccatagacggcctacagctcgtaatttgtctaaggtaaaaggcttaaataggggcacaactgtagtaatggtattttcggtaaagagctgcatgtgtcctaaaatagcgatcaggaatccaatggtataaccgaaattggtaattaaatcggtccagatggcatcagttgggatataagaagcaataattgccttaaatacaaatgaaaaactgatgactagacctgctgcaatgcctgaaaagatgagcgcggctgttgggcgatctaactcttcggcaccatcacggcggataatttcatacactaaacggggcgacagtttctcgtgttcttcaactgccattttttcacgccagcttagggtttgatcgactttctcttcttctagttcatggtccatcaggtttactcctcactgaataaataatttatatttatcgttttttatttattgttaaggcagtgctcaggataaatctagaagattcctaccagctttatgtgtttttttataaattgaacactctgggggtaagcgaactagaacaataatgcatgaagaaaagaatcgaccagacctgagagaaaagttaagtataagaaaagatagcaaactcaatcagcctgctataaaaagtgtaacgttgaagctaagcgcttgtagtcatgaaaatggcaacaataattaaaacaaggtatatgctctcaaggtacgtatgagtttcatatagtcgccttgggaagcttcagaaatgacagtttcgatttcagcttggctccatccttgctttaaggcagagtggctaaaattagataaaatcactaatggattttcaccaaaatggattggatgattcattaatctcttttcaggcttaaatagttccatagactcatcctatttaaaaatttaattattgtgatgcaatttatattttttttgattttagtgccttgttttgagattgtgcaagtcataatttaattaaatatacaaatctgtctacttttcctaaattctaggatgctgaaaataaaaaaaccgagctgaaatgctcggttttttataaagttgagctgattagatgtcagataaatctacgcctaaacgagcagcaacttcttcataagcttcaacaacaccgcctaagccttgacggaaacggtctttgtcgagttttttcttagtgtctttgtcccataaacggcaaccgtctggagagaattcgtcaccaagtacgatacgatcatggaaaacaccaaattcaagtttgaagtccaccaaaatcatgttgccttcagcaaataatgcttttaatacatcatttactttataagttaacactttcatttgttctaactgttcagcagttgcccaacctaaagcaatcgcttgagattcgttaaccattggatcgcctaggccatcatctttgtagaacaattcaaatgtaggaggagttaactctttaccttcttctacacctaaacgacggcatagagaacctgctgcatagttacggattacacattcaacaggaatcatttgaagttttttaacaagaacttcagttggagaaagcaatttttcaaaatgcgtttcgatacccgcttcagcaagtttttccatgatgaaggcgttaaaacggttgttcaccttgcctttacgatctagttgttcgattttttcgccattgaacgcagaggcatcatcacgaaagactaaaatcagatggtcggcattgtctgtttcatatacagattttgctttaccagtatagagcaaggtttgttttaacatgagggaacctttttaaaaaaaatgcctagtaaacgactaggctggccaattttggtaaatctggtttaacacttctgcggcaacatcagggctggcaaaagtgttatctggattaaatagagcaaggctatgactagagccaacaccagtgagcttaagcacatatgtgttgtcatttactttaatcgtcgcttgattgttaccttgagcgatgacgttgtaatttaacgtgcttaacgtagctttggtgtattgccaaatctcggcagtacttccatcaatttttaacagtgggtttttattaccatctgtcacaagttgagggcgaccaagcgcactacctgtttgagcagatgcatctgctgtcgtatcagtttgaagtggttcaggacgtggcaatgcaaaacgattgccacgcttgttttcaaacttcggtgcgtgatcgatagcaagctggtctactgttggtgcaggatacaaaggtgtcgctggtcgtacagttgcatcggcagggtactcaagtggggcgagttgctttgcatttttataatctaaagagtgattattgagtgcgaagcgaccacagccagctaaacttaaggctgaaactgcaaggactaaaccaagacgtaattgcatcataaattgctcttattaaataattcccgcatcttttagggcattgcggagaggttcgcgatattgctcagcgagaggagtgagtggtaaacgaataccagtatcaatcagtcccatctcatgtagtgcccatttcacaggaattgggtttgattcgcaaaatagaatattgtgtaaatttgcaatcttattgttaagcgtctttgcttgttgctcatcttttgcaattgcaaccgcacatacttcgctcattgctttaggtgcaatgtttgcagtaaccgagatattaccgtctgcgccaagaagcataagttcccatgcagtttcatcatcacctgagtacacagccatcttgccgtttaaagcatcgattaaagctttaccgcgcggtacgtcacctgttgcatctttaatgccgacaatatttggaatttccgctaaacgaacagctgtatcgtttgacaaatctacacctgtacgaccaggtacgttgtaaagaataagcggtaattcaacagcttcagcaatcgctttatagtgttggtaaaggccttcttgagtcggcttattatagtatggggttacaagtaaagctgcatctgcgccaaggtctttggcagctttagttaattcgattgcttcacgggttgagtttgcaccagtaccggcaataattggaatacgtttgttggctacacgaataatttctttaataacctgtgtgtgctcttccatgctcaatgttgaggcttcgccggttgtaccgacggctacaatactgtttgtaccttgttctatgtgccactcaaccagcttctcaagactcttccaatctacaccgccatctttcaacatgggagtgacgattgcgacgattgagccttgaatggtctgtgcttgctgagtcattttaaaaaatatcctatttatccatccgaatctgaggtaagaaaaacaaaatgtgggatggttgcagtattttgattgtccagttctaacaataacagattgttgaatgacaattatgcaaattatgactgatcagacgcataagaacaatatgcttgactgataaaccctatgtaaacttgagcaaaacatagaatgccaatttgatcatttcaagtaaaagacagtaaaaatgagaatatggcgcaattcttccaacctctacttaacacggtcttttttatggcaagataaaatgcatatttttcccgaatgggacttaagatggcatgaaaatgaataaacaaccacaaaattcggctttagtcgtagttgacgtgcaaaatggttttacccctggcggaaacctagcagttgccgacgctgatacgattattccaaccattaaccaattggcaggttgttttgaaaatgtagtcctcactcaagactggcatccggataatcatatttcttttgcagccaaccatccgggcaagcagccatttgaaacgattgaactggattatggatcacaggtgctttggcctaagcattgtatacaaggcactcatgatgccgaatttcatccggatttaaatatcccgacagctcaactgattatccgaaaaggttttcatgctcatattgatagttactcggcttttatggaagccgaccactcaacaatgacaggtttaactggttacttaaaagaacgtggtattgatacggtctatgtggtcggaattgctacagacttttgtgtcgcatggactgctttagatgcggttaagcaaggctttaaaactttagtaattgaagatgcgtgcaaaggtattgatcttaatggttcattagaacaagcgtggcaaactatgcagcaacaaggtgttgttcgtattcaatcgactgatctgttgaatgaatgctagagatactgattttgatgcttggactttaattgcgatttggtatggatgaacagtatgtctgcattactccgttttactcagtttgttcaaaagacgtttgccctatgggtaattatttttgcagctctggcgctatggcaacctgaattttttgtttggctcaaagcgtacatcccatggattttgggcattattatgcttggcatgggaatgaccatgaccgttgatgattttaaaggggtactacaaagccctaaagccgtgttaattggggttgttgcgcagtttgtggtgatgccgggcttggcatttattttatgtaaattatttaatttgcctcctgaaattgcggtcggcgttattttggtaggttgttgcccaggaggaacagcttcaaatgtcattacctatatggccaaaggcaatgtggctttatcggtcgcctgtacctcggtatcaacactcttggctcctgtgttaacacctgcaattttctatctacttgctagccaatggctaaagattgacgcggcttcgatgtttatttcgattttgcaagtcgtactacttccgattgtgattgggctgattttgcgaacttggcttaaacgtcaggttgaatcctatattcaagtcatgccattagtttcagtgattgcaattgtagcgattgtggcagccattattggtggcagtaaagcagctattttacagtcgggtttgctcattttggcggtagtgatattgcataatgggtttggatatttattaggttttgccgcagcgcgtttctttaaattgccttatgcggacagtaaagcaattgcggtagaagtaggaatgcaaaactcaggcttgggcgtggcgcttgcagcagtgcattttgcggcttccccgattactgccgtaccaagtgctattttcagcctttggcataatatttctggtcctgcacttgcgacttattgggcaagtaaacacaaacaataataactatataaacgatatacattagaaaagaaggccaaacggatagtttggtctttttatttaaagcactttttatttgagctgaatttaaaattggtatgtcttttgcttcgaattgatgcactgaaaataacgtgaatatcaacataaatcgcaaagaaaaaaataaggcatttttttgatgaaccagatttttaaattatttattcccatgctctctagcaatttaattgtagtattaagtggattgattgatattgcttatgtagggcattttagcaatgatcatgttgccgccttatcggtgactttatctttatatacagtggtttatgtcattggaatggggatactgcaaggtgtgatgcttaagctctcggaagcttatggttgccatgacatacctcgtattcgtcaaatttttattcaaggcgtttggctgatgttaggttcggcattggtgagtattgccttgctttacttgttccgtgatctaccaaaattatttggtgcatctgaacatgtcgtttcaattactaaaaactgtatttgggctttggtatttattttacctgcccatttattgatgcgcttatttacagctttgtctcaggtcactgaaaatgcgtataaggttttattatcagatagtcttttcttcattcttaaaattattttgtcctatcttctgatttatggtgtcgctttattttcaattccgccactcggggcgataggggcgttgttagccactatcattgtacggtggtttatgttggtcgtttattacctgttttttctagagaaaaagtacatctttattgaacatccagaacggtcagttgaagatagctggcaaagtctgcgtatgattttaaaaatagggatacccacagcgatcatggcattgatggacgttattgcattttgttcagttgctattctgattttaccttttgggagtgtggtatctgcagcccatcaaattgtcgcgagcactggcggtttcatgtttatttttccttcatcaattgcctcggcttatagcattttggtgtcaagaactatgggcagcggcaacatgaaagaagcagacaaaattgccagacaaagtatatgggtcattatggcagtgagtggcagtttatccttgtgtttatgggtggagaggggcttaattgtcacgttctattcagatgatttggctgtacagattttggctgcatcactgctcttgattgtctgcatgtctcattttcttgatggcttaatgacgttactaacctctttgctgcgttgttgggatgtgtcgattttacccatgctgatttttttagtcgtggtgctatgtttcggattgggcggtggttggtggatggcttataaagggctgcactgggggagtcactctatatctgcaatgggaatttatggtttctggagtatggcagccataagctatttagtagcttgtgtattgagtgccttctgttttcgttttagaaagcaattaagaggtttttgattaggtagatcaacacaaccttaaagagggtgtgctgttaaccattcttcaatctcattttcagaaatcacttcaaaaccatggcgttgtaacagtgctgtggtaatcccaacacccgtgatcttctcgccttggaaagtaccgttataaattttttgactaccgcaagacggactgttttcttttaaaacaacacaggttgcttgtatttgccgtgcaatgtctaaagtacgataggcgccttttaaatatagctcagtcacatctaaaccagatgaatccaggatttttgccttgccatcaagcacatcttgacctgtacccccaacaatttctgcgggtaaccttggagtagtaaaaccacctaataactctggacaaagtgcatgcgcttttttatttaaaaatagctgcttaagtgtagtgtgtgagcaagagcgtccatcgtagcgtacaggctccccaattaaacaggcactgattaaaagcatgatttttccgcccttagaactttaaaagccatgtgagtgtacccaatgatttataaaatatgaaatctaaaacaagcacaagcaaacgaagtaatttgattaataaattacacaattcataattaaattatgtattgcataatttaattgtttttagtagcatctgttttaaggtaaatggccattgggggtccaacaaggatgttggcctccataaatctaggaataactttaggaaaagacgatttttaaaggtttattgaaaaatctcaatcgtacttttagataagaaaggacagtgtgtatggaaaacaaacaccatatagaagggaaattaatcatcggctttgcgctcactcaatcttcgttttagttattggtttttttctcataggatgcgttgggctaaggcattttgacggttcaaacatactcccagcaaatgcgtattctatagagaaaggagctgaccagatcagcatgagaagtaaacggatcaggtaattaccagagggaaactagatggatattttagagaacccattagaattatgcggttttgcatttattgagtttgtttcaaaagaaaatgaattagatccaatttttgaaacaatcggcttttcaaaagtagccaagcataaatcgaaaaaagcgtacttatggcgtcaaggaaatatcaatattatcctgaattatcagccagaatcttatgcttcattcttttttaatgagcatggtccatctgcttgtgcgatgggattcaaaactcgtgatgcagcaaaagcttttaaaaaggcggttgaacttggtgcagaaccaatgtactcaaaagttgggccaatggagcttaacattccggcaattaaaggtattggtggtatgccaatcttcttagttgaccgcgatatttatgaaaatgactttgttttctttgatgatgcgcagcgtaaccctgaaggtgcgggcttaaaagaaatcgatcacttaactcataacgtctacaaaggacgtatggagtattgggcaaacttctacgagaagatttttaacttccaggaaattcgttatttcgacattaaaggtgaatatacaggtttaacctctaaagcattaactgcaccagatggcatgatccgtatccctttaaatgaagactcagacaagggtaacggtcaaattgcagaattcttagctgattttaatggtgaaggtattcagcatatcgcgtttatttgtgaggacttaatttcgacttgggataagttaaaaggccttggtcttaagtttatgacaccaccgccaaatacgtattatgaaatgcttgaagagcgtttacctgaacatggtgaaccaactgaagagttaaaacaacgcggtattttattagacggcagtactaaagatggccagaagaagcttttattacaaatcttctctgaaaatatgattgggccagtcttctttgaatttattcaacgtaaagatgacgacggtttcggtgaaggtaacttcaaggcattgtttgaatcgattgaacgtgaccagattcgccgtggtgtgctcgaagcaaaataagttttgctttgtctctaatctaaaaaaaccaagagcaatgctcttggttttttatggctattgattagcggcttttaatatattgattaattgaattaatctcatttttaagtgtttcaataattttactttgtggatcgacgggtaaaaacatctcgctatcaagcgccacaatacaaaactcaatcccttggtttgagttaaatactggcaggcctactgcgttaataccggtaagtaaatcacctttcgccgcagacatttgttgttggcggatcgtctctttaagttctaaaaattcttcccagttatgtggcgcaatgtttagcccaagttcctgatgtttttgccactcagtttctaataaaggacgaacaaaatgctcaggaaggtaagaagcaaataaacgcccagcagcagaattgactaaaggcataattgagccaactttggtcacaatcgaaattgggtggttagattcaatcgattgaaccacgacagggcctttgggtgaccacttactaatttgaataccacagccaattttgctttgtaagtcgtaaattaaatgttgtactaactgtaaagtatcgctgtgctgaatgcagtttaagcctaaacgccatgcttgatcacctaaggcatattggccatcctcaagttgtttggcgtaatccatgcgaattaagctcaccaagtagcggtgtactttggcaggatgcatctcaagcttactagataagtctttgagaataatgggttgattgtgctctaaaagggcatttagtacggataagccaacttcaagtgattgaacccccccagatattttttcttcaatcatttaaatacccttaatcgatttacttcagcagttaaacagttttgttcagaacatagattggcattgatgcgttttacatcatgcctgagcctatagaaaaatagaaatcacctttttctattagcgaaattcacatgtttaataatccacaatttttacaaacaccttcatcttacatttatagcgtaaattgatagaggtttagtagatttaaacaatataaatcggcattgatatagaacagttcattcaaactattcccatcaatgccgacttttaaaacgattgctttgaaagaattacgcgcctaattcttcttcatgcaagaaatgagtgtggtgtggagcgcgtttggttttgctccattcctctaacatttcagttttcatttcttcagtaatttttgcaattttttcttcagcatgtgcatcgttataagtcagttctaaacgatgtccatttggatcaaagaaataaattgagtggaagataccatggttagtaatacctaatactttaacaccgttgtcttccaaatgttttttggcagctaaaagggcatttaaatcttcaacttcaaaggcaatatgttgcacccattgaggcgtattttcatcacggcccatttctggttgggttggcaattcaaaaaatgctaaaacgttgccttgacctgcatctaggaataaatgcatatacgggtcaaaagctttcgttgaaggtacatggtcttctgcaaaagctaagataaagtccatgttgagcatttttttataccactcaacagtttctttcgcatccttacagcgatatgcaacgtgatgtatttttttaatggcaaatgtcatgttgaaactcctttttactattcccaatctggttgttgttctggcgccgcgttatagaaggctgggatagacaaacaatgttgataaattgattcaatttttggaaacgccgacaaatcaatcttgaagcgtttcgcgttgtaaacctgtggaattaggcagcagtcggcaatggttgcgtgttgtccaaagcaaaattgtccatttgaatcttgaagttgctgttcgagtgtttgaaagccttcaagaatccagtgctgataccagtaatttttttgttcgtccgaaacatttaaatcattttttaaatatttcagcacgcgtaagttatttaacgggtgaatatcacaggcaatcgcctgtgcaaaagcacggattttggctctttctttcacatcatttggaagtaatttggtttcaggatattgttcatccagatattccaaaatacttaatgactgtgacagggttaaatcgccgtccactaaagttggtactaaggcactgcgatttaactttaaatagtcttcactttgctgctcatttttaactaaatgaacgggtacagtttcataagcgagacttttaaggttgagaccaatccgtactctgtaagctgcagagctacgaaagtaactatacagcttcataattaggctccgaagtttctgcaaaatcaaaagttaatgcaggaagtaccgtatttcggacttcaccaaaaccaatacggataccatttttctcacagtggcctttcatgatgagtgtgtcgccgtcttgcaagaaaccacgagtttcaccattcgcaagtgttagaggcttggtggtgttccaagtcaactcaagcaagctaccatacgaatctggtgtagaacctgaaatggtacctgaacccattaaatcaccaacctgaacgttacagcctccaatggtgtggtgagttagctgctgagccatagaccaatacatatatttaaaattagtacggcagatcacatcaggttgtgttgatttcgggctttgaatttcaacactcaaattaatgtcgtaactattcgcgatattttcttgtagatacgctaaaggtttaggctcttgttttgggccttccactttaaatggctcaagtgcttcaagcgtgactacccaaggtgagatggcactagcaaaagattttgaattgaaaggacctagaggtacatattcccattgctgaatatcgcgcgctgaccagtcattgagtaataccattccaaaaatatggtcccaagcattttcaattgagattggctggccaagctccgttggtttaccaataacaaatgctgtttcaagttcgaaatcgagtttacgcgtagctgagaaaactggacgctcttcatttggaagtttaatttgtccagatggacgcacgacttgagtgccactgactacaacagagctagcacggccattgtaaccaacaggcaattcagtccagtttggaagtaaggcatttttagggtcgcggaacatacagcctacattggttgcatgttctttagaagaatagaaatcggtataaccagatacttgaagtggtaaatgcaaagtaacactgtcttgcttaaccaaaacttcttggcgcaatgcttcattttcttgaagcgttaaattatcaactgaaagaagagactgtagcgttttacgaactttagaccaattggctttgcccgattgaataaatttattcagtgtaggctggttaaagtatgtgtcttgatctgaaagttttaaaagaccatgcttttcaagagcagcgagatcaatgacccaatcaccgatagctacaccgacctgacgctcgccttcggctgttctactaaaaataccataaggcaaattatgaatagtgaaatcagattgaggtgaaacttcaataaaagagtttagtttttgttccattttcgcttccttgtcttcatctcgcgtcttatacaaataaaagttcagtctagggactgagctactcaataagttttaaccgttatttagatcatctttttacttatgagtttgatagagaccgagaacaaccaattacttcatggttcttataatactgaattcataaaattacgcaatacataatttaattacacattacataataattgttatttcttgcattttctgttttcatgcgcggttgtgagaaaagtaacgcaattattttttcatcaatctctatgaaaatccgatcaatttatgatatacgtaatttattggaaaaaaattacgtgacaaggatgagaataatcatatgtcaacacaagagcaaggaaacctgaaacatggtttgagtaatcgtcacatccagctgattgcgttgggtggagcgattggtacagggctgtttcttggtatatcacaatcgattaaattggcaggtccatcggtaatcttgggttatgcgattgcaggatttattgcttttttaatgatgcgccagctcggtgaaatggtcgtagaagaacctgtaagtgggtcttttagccacttcgcttacaaatattggggaccttttgcaggcttcatgtcaggatggaattactgggtactcaatgtacttgtgtgtatggcagagttaagtgcaattggtctttatattcaatattggtggccgcaaatcccaacgtgggcatctgctctaacgttctttattctcattaatggtatcaatttactgcatgttaagttttttggcgaaatggaattttggttttccattgtcaaaatcttagcaattttagccatgatcggtttcggttcatatttacttgcaaccggcacagcagggcctcaggccagtatttctaacctttgggcattgggtggtttcttcccatttggtattgaaggcttggttatggcaatggctgtgattatttttgcttttggcggtattgagcttttcggtattactgctgctgaagcgcgtgatccagacaaaactttacctaaagctgtaaaccagattatctatcgtattttgattttctatattgcgacactttttgttttattctcactatttccatggaatcaaatggcagaaggtggcagtccttttgtgatggtctttgcatctttagatagccaaggtgttgcgacattattaaatttcgttattttgacagctgcggtttccgtctataacggaaccagttattgcagcagccgtatgcttttaggtcttgcccaacaaggtaatgccccgaaagcccttgcccgtattaataaacgtggtattccaaccaatgcggttctagtctctgcatttgtgacggtattgtgtgttttactcaattatattttccctgaaaaagcatttggtttactcatgatgcttgtcgtagcagcgattgtaattaactgggttgtgatttcatggacacatttaaaattccgtaaatttatgcaacgccaaggtcaaaccactaaattcccaagctttatgtatccatttagcaactatctttgcatggcattcatgcttggaattttagttgtgatgtctttaacgccagacatgcgtgtggcagttatgatgattccaggatggattttgtgtttgatggtggcttatcaatttaagcgccgtaaaataaaagctgagcagcctgttcatgctttagaagccgatatgtaaacagatagttagaagctaaagaggacgtataaatacgtccttttttattttttaaaatttacaacagaaattaaaggatttaataattgttatattataacatttctgaaattaaatgattaaaggctttcagatgtttagggaagatagaatatatttatgaagcgttatttaggtttactcgtattatctctggcggcttgtagtactcaaacaccccagccgacgattactcatcgttctcccactttgcctcaaccatctaaaactgtggttaaaatcaaacaacagcctgaagattatgtcgtttggatcgcaaccttagatcacagacagtctgtacaagcttataagcaatttcttaagcaaaaaggacttgccgatttagttccagaccacgagttattacgttcagccagagactggcaaaaatgtggagttgagccttacgcagttccaccacgcgagatttggtccaatattgttccgacgctcaatatattaaaagcgttggttgatgatggcgtaattaacgattttgaagtgacttcggtctatcgagctttagctttaaaccgttgtgcaggtggtgctgatgcttcccgacatgtctttaatgcagcacttgattttagaattgggccagaacagcctagcgacttagaccagttcaatattcaacaaactaaaaccaagctttgtcagttctgggcgactaaaggccaagcgtttaatatgggactgggtgtttatgcttcaggacaaatccatattgatagtcaaggttttagagcatgggggccagaccatcactatagaacctcaatttgtcagggactataaaagcaactttttcaaagactaagtgatttggcttagataaaactggaataaaaacttgatcaatagttatgttataacataacattattgtggtttagaaatagattacgcctgtgatctggccatatttaaatggccagccatgatcagtttaaatattattcaaagagatcaagccatgcacactgcaatcgccaactcatttgccaagcttcccgtcactgttttatcgggctttttgggtgcaggaaagaccacattactcaaccatattttaaataatcgcgaaggccgccgtattgccgtgattgttaatgatatgtcagaggtaaatattgacgcggctttagtacgcgaaggtggggcagagctttcaagaacagatgaaaaactggttgaaatgagtaacggctgtatctgttgtacgttacgagaagatttattggttgaggtgagacgtttagccgatgaaggacgctttgaccaattggtgattgagtcaacaggcatttcagaacctttacctgtggcagaaacttttacttttgaagatgaagatggaaactcactcaatgagtttgctcgactcgacactatggttacggtagtcgatgcttttaactttcttaaagactacagttcagttgactccttacaacaacgcggcgaatcattaggcgagcaagatgagagaactgtggttgaccttcttatcgatcagattgagttttgtgatgtgattgtactgaataaaattgatttgattgatcaggctcagcaagaccatcttatcgccattttaaaaacgttaaacccgcgtgcccgaattgaaattgctcaatttggaaaggtcgctttagacaaaatcttaaatacacagttatttgattttgatgaagccgcacaagcaccgggctggttaaaagagttacgcggcgagcatacacctgaaactgaagagtatggcattagtagctttgtttaccgtgcccgccgacctttccatccagaacgtttttatgatttggtacaggctgaatggccgggagtcgtgcgttccaaaggctttttctggttggctgccgaaccgacattggcttactcatggtcacaagcgggtgcaatggctcgacacggtttagctggttattggtgggcagccgttgcggaagaagactggccgagtgacctagccagcattgaacaaattaagaaaaattgggatgaccgcacaggtgatgcgcgtcaggagctggttttaattggtatgcaaatggatgagcaagctttaatacaacgcttggatagctgcttgttaagcgatgaagaaatggctttaggtccgcaagtttggcagagctggtctaatccttttaagcaagatgatgaaacgatgttgatcgcttaataaaaaagcccctattttcaaggggcttattttttatgatttatctttaataaaaacctttcgaatgtagctgttaagtggtgtggaataatatttttcaattgctgcgctaatgataaaagtcagaaccaaatagccaattaaaagcataattttaatgctagagtcggtttgggctggaataaaagcaaccttcataaggcccagcacaaccagatgaaacaaataagtttcataactcctttgccccaaccagaccattactttggtaaatagactatgtgcttgtgtttcggaaggatgttggaaacacagaatgagtaaacctgtggcaagagcaaataagctaataccccatgtactgacttctttaatgggcgcatataaatatagagcggtcatactcaaaataatcaaccatgaaagaggttttttataggtccaatttggctgatatttatgagaaaaaatcgccgttaaacagcccaccgctataccatcaaaacttgaaaaataatgatataaataagcgccgctttcttctccaaaatggagagatctaaaataaggcccatataaaattaccccaacaaatacagcaataaagaccttattactacgggtgagtagacacaataatggaaaaacaaagtaaaaaacttcttctacagagagcgaccacaacacgcccaaagcgtagtttacccaaccaaatttaataatcaggatattcatccagaaggttaaggctgcaaatatggttaaaggataagagacctcaatgccattaggtgcttggttcataaagggttttaagtcaaatgaaccaagtatgcttacacctaaaatgagtaataccagacacggtaaaatacgtgctgcccgtcggatataaaaatgcttgaggttaattgcagaaaattgtttgtctcgttttaaagtgtgatgggtaattaaaaaacccgaaatcacaaaaaacatggtaacgccataatttccgtttcttgcgatgactgtgctaaatgcttcacctaaaaaatcaaaacctaaccatgtatctttgagtttatagggaatattaaaatgatgtaaaagaaccaaaaggatagaaattcctcgaagaatatctattttataattacgcattcgatgtgcttccagttttattaatatactgtgtggcagaagaatactatcgatcagttattttaaataaaaattttaagcatcatttcgtaaaccagaaaaaatgatatttttgttttctaggatggggcactggcttagcaaaaataactattaaataaatgttgataaagcctttatatatttgaatttctctacataaaactttaaattagctcttgtcgagctatgtttattttttaaactttttaaaatatatttaattcataaattaacatgttgtatgtggttgtatatacatagcatgtcaactaaaatacctttttgcctgctgcctttttgagtatttgttatgcccagaacatcaaaacaagaacatactgagctttcgattgaagctgatagtccagttcctttatatcagcgcgtaaaacagctgatttcacaaaagatttatgaaggctcttgggctgtaaataaaaaaattccttcggaaagtgaactcgttaatcaactcggctgtagccgtatgacggtaaaccgtgcgctacgcgagttaacaacagaaggcttacttgttcgaattcagggtgttggttctttcgttgctgaagggcaaggccgaactgcactttttcaaattaacaatattgccgatgagattattgcacgaaaccataagcaccatgctgaagttttagtcttagaacaaatttatgcaaatgcagagcaaagcgtgttaatgcagactcgcgaagggcaaaaattatttcactcgattattgtgcattatgaaaatgatgtacctgttcaggtcgaagatcgtttagttgatgcagcactgattccagattatttagaacaagattttaaaaccattaccccaaatgcttacctcatggcaaaagcacccgtgacagaaggtgaacacattgttgaggccgttttagcatcgcctcaagagtgtaagtggttaaagattactaaagctgaaccgtgtttactcatccgccgtcgcacatggtcaaacaaacaactcatttcaagtgcacgattgatttatccgggcagtcgctattatctcgaagggaaatttaatccatgattaaattgatcagggccgatcaatatacaaaaatgctttggaaaaatggtgcaggctttactttagaaattgctcgcagccaaggtgaagccgactttgagtggcgcatttcgatggcagatgtaacaacttctgggccattttcgttatttcccaataagcaacgcattattagcgtactcgatgggcagggcatggtactgcatgtcgatgaccttcctgccaaaaagctgaaacagggcgatatttttgcttttcatggtgaaagtcaggtccaaagtgaactggtagacggtgcaattcaggatttaaatttaatttatgatcctgcaaagtttcatgcccgttttcagtggttgaatgaggcagcggagcaggcatttataagctcggcagacctgatttttatttttaatcagggtggtgaaacggaagtgaacgttgatgagcattccgttcagcttgctgctcatgagacgctaaaaattgagaaaaaatctggtgtcacatcaatgaattttccaaaaaaaaagcacaaaagttgctatatcattgagttaattcaacgttaaaaagatatagtttactgattaaaaagcacatgtcttgttagaagatatgtgctttttttatgtcagatataaaaataaattaatttaattcataagcttattcaatttttttaaaaaaatacgagcaagcctcttcacgccgaaaaatatttgtgtagtatatagatgtatatacaagttaatacattactatacaaatgcagaaacaagtgatgttctgctgatgtagctcaaaggaaggagtccgactgtgacaacaacgacaacaaaatttcgtgatgtagaaattcgtgcaccacgcggcactgaattaacggctaagagttggttaactgaagccccattgcgtatgttgatgaataaccttgatccggacgttgcagaaaacccgaaagaattggtggtatacggtggtattggccgtgcagcacgaaactgggaatgtttcgacaaaattgtagatacgctaaaaaatcttgaaactgacgaaactttattagttcaatcaggcaaaccagtaggtgtatttaaaactcataaagatgcgccacgcgttttaattgcaaactcaaaccttgtaccgcactgggcgaactgggaacactttaacgaattagacgctaaagctttggcaatgtacggtcaaatgacagcgggttcgtggatctacattggtagccaaggtattgtacaaggtacttatgaaactttcgttgaggcaggtcgccaacattacaatggtgatttaaaaggtcgttgggttcttactgctggtttaggcggtatgggtggtgctcagcctttagctgcaacacttgcaggtgcatgttctttaaacattgaatgccaacaagcaagtatcgatttccgtttacgtacccgttatgtagacgaacaagcaactgatttagacgacgctttagcacgtattgatcgttatacaaaagaaggtaaagcaatttcaatcgcacttcatggtaatgctgctgaaattttacctgagcttgtacgccgtggtgtacgtccagacatggtgactgaccaaacaagtgcacacgatccacttaatggctacttaccagtaggctggacttgggatgaataccgtgaacgcgcgaaaaaagaaccggaagctgttgtaaaagctgcaaaacagtcgatggcaaaacacgtacaagccatgcttgatttccaaaaaatgggtgttcctacatttgactatggtaataacatccgtcaaatggcgaaagaagaaggcgtagcaaacgcttttgatttcccgggctttgtacctgcatacatccgtccgttgttctgtcgcggtattggtccattccgttgggcagcgctttctggtgatccggaagatatttataaaacagatgccaaagttaaagagttaattcctgatgatgagcatttacatcactggttagacatggctcgtgaacgtattagcttccaaggcttaccagcgcgtatttgctgggtaggtttaggcttacgtgcaaaacttggtttggcatttaacgaaatggttcgtagcggtgaattgtctgcaccgatcgtgattggtcgtgaccacttagactcaggttcggttgcaagtcctaaccgtgaaactgaagcaatgcaagacggatcagatgcagtatcagactggcctttattaaatgcattgttaaatacagcaggcggcgcaacttgggtgtctctacatcatggtggtggtgtaggtatgggcttctctcaacactcgggcgttgtgattgtgtgtgatggtacagatgaagctgctgcacgtattgctcgcgtactgaccaatgaccctgcaacaggtgttatgcgtcatgccgatgcaggttatgaaattgcgattaactgtgccaaagagcaaggcttacacttgccaatgatcacgcaataaaaatacatggaagaactggcggtgctttttgcaattgtgaaaagcaccgtctcagcagaatatagtgcaaaaaattaggaagccaacatggaattactgatccaaccgggaaaactgaccttagccgatttacgtcaagcttacctcaacccaattaaagttaaattagatgaaagtgcttcatctgcaattaatgcaagcgtggcttgtgtagagcaaattgtaaatgaaggacgtacagcttacggtattaatacaggttttggtttacttgcttcaactaaaattgcgcctgaagatttagaaaaattacagcgttctttggtgctttcccatgccgcaggtgtaggtgaagcacttgatgatgcaatggttcgtttaattattctattgaaagcaaatagcttggcacgtggtttctctggtattcgtcgtaaagtcattgatgctttgttggccttaattaatgctgaagtttacccacacattccacttaaaggttcagtaggggcttctggtgacttggcaccccttgcacacatgtctttggttttacttggtgaaagtaaggcacgttataaaggtgaatggttaccagcagttgaagctttaaaaattgcaggtttggaaccaatttctttagcggctaaagaaggtttggcacttttaaatggtacgcaggtttcgacggcttatgctttacgcggcttatttgaagcagaagatttatttgctgccgcgacagtttgtggtggcttaagtgttgaagcaatgcttggttcacgtgcacctttcgatgcgcgtattcacgaagtacgcggccaacgtggtcaaattgatgtggctgcggcttatcgcgatttattgactgattcgagtgaaatctctcgttcacatgaagaatgtggcaaagttcaagacccatattctttacgttgccaaccacaggtgatgggtgcatgtttaactcaaatccgtcaggctgctgaagtattagaaattgaagcaaatgccgtatctgataacccacttgtgtttgctgaacaaggtgacgtgatttctggtggtaacttccatgcagaacctgttgcaatggcggccgacaatttagcattggcaattgcagaaattggttcactgtctgaacgtcgtatttcgatgatgatggaccgtcatatgtcacagcttccaccgttcttggtagcaaatggtggtgttaactcgggctttatgattgctcaggtaaccgctgctgctcttgcaagtgacaacaaggcgcttgcacatcctgcaagtgtggatagcctaccgacttcagccaaccaagaagaccatgtatcgatggctccaaatgctggtaaacgtctttggtatatggctgataacgtccgcggcattttagctgttgaatggttaggcgcttgtcagggtctagacttccgtgaaggtttaaaaagctcgcctaaacttgaacaagctcgtaaaatcttgcgcgaccaagttccttactacagtgaagaccgtttctttgctcctgatatcgaacaggctagtgaattgcttgcgagtggttgcctaaacgagttactcattccaaaactactccctagtttatctgaagtgtgattgataaaacggtcacatggagtggccgaatccaactaaatttcctcaaggattggagattataatgtcacaaaactccacactacagcggggcttaaacacccgccacattcgtttcttggcattgggctcagcaattggaactgggcttttctatggttcggcaactgctattaaaatggcagggccttcagtattacttgcttacatcgttgcagggattgcaatttatattgtgatgcgcgcactgggtgaaatggcagtccataaccctgtctctggctcatttagccactatgcttctcagtacattggtcctttggccggctttacgacgggctggacttatgtttttgagatggtgattgttgcaattgccgatgtcactgcgtttggtatttatatggggttctggtatcccgatgtcccacggtggatctggattttgtctctcatcatgttcttgggcgcaattaacctcattcatgtgaaagtctttggtgaactcgaattttggctctcaattgtcaaggtgagtgccattgttgccatgattttagggggcttaggtttgatgttctatggcttccatgctgaccatagcagtgtagtgccggggattcaaaacttatggatctatgaaggctttatgccacatggcattgcaggcttggttgcatgtttatctgtagtggtatttgctttcggtggtatcgaaattattggtattacagcaggtgaatcacaagacccgaaaactactttacctaaagcaattaatgctgttccggtacgtattttacttttctatgtactaaccatctttgtactcatgtcgattttcccatggaaccagattggtagccaaggcagcccgtttgtacaaatttttgaaaacttaggcattaaatctgctgcaaatattttaaatattgtggtggtaactgctgcaatttcggcaattaacagtgatgtgtttggtgcaggccgtatgttgtacggtatggcaaatcgtggtcaagcgcctcgaattttccaaaaattatcgcgtaatggcgtgccttggatgactgttgtggttatggctggcgtactgttaattggcgtcgtgctgaactacctgattcctgaaaatgtgtttgtcatcattgcatcaattgcaacgtttgcaactgtttgggtatggctcatgatcttgctttcgcaagtggctatgcgccgtaaattatctactgctgaaattaaggcacttgatttccctgtatttggctggccatatgcccctgcttttgcaatcggttttatggtgttcattttagtgatgatgggctacttcccagactcgcgtcctgcaatttatgtaggaatcacttggcttgctctcttaactattgcttatcgtatttgggtaaaaccagagcaaagcttgggaaaggaaagtgagcctgtccagcaaaacatagaaatggaaagctaacaaatcagctgcccaatagttttactgttgggcagtttcgaggataggctaatgaaaaaactttggcaaaactgccatattgccaccatgcaaaatgggcaatattcctacattgaagatgctgcaattgtcacagaagggcatctcatccactggattggaaaacaacaacaacttcctgccgacacttattccgaaacagttgacttaaatggcgcttgggtaaccccggggttcatcgactgtcatacgcatagcgtatttggtggtaaccgtagtgttgagtttgaaaagcgcttacagggcgtgagttatgctgaaattgctgcaagtggtggcggtattgccagtacagtacgcgcaacccgagaagccagtgaagaacaattactgaactcagcccttaaacgtattcgctgcatgcaacaagacggtgtaaccaccattgaaattaagtctggctacggactcaactacgaaaacgagcgcaaaatgctgcgtgtgatccgtcaaatcggtgaagctttaccaatgacggtcaaaagtacctgtttagctgctcatgctttaccgccagagtataaagaccaaagcgatgcttatatcgagcatatctgtacagaaatgctgcctaaactacatgctgaaggtttagtcgatgctgttgatgctttctgcgagcatttagcattttcgccagctcaggttgaacgcgtttttaaaacggcacaatcattgggtttacccgttaagcttcatgcagagcagctctcatcgctcggtggctcaagcttagcagcacgttatcatgctttgtcggctgaccatttagagtacatgaccgaagatgatgtcaaagccatggcagagtcgggcacggttgcagtgttattaccgggtgccttttatttattgcgtgaaacccaatacccaccgattgaaagtctgattaaacatggcgtgcgtattgcgctgtcgagtgatttaaatccaggtacatctccagcactctctttacgtttaatgctgaatatgggcagtacgttattccgtttaacgcctgagcaagcattagcaggtgtcactattcatgctgcacaagcgctcggtttagagcaaacacacggtagtttggagcaaggtaaagtcgctgactttgtggcttgggatattgagcatccatctgaaattgtttactggctgggcggagatttgcctaagcgagtcgttcagcatggacaagaagttattttttaaacggtgtcacatgaatcacacatttaaatggcaaggccgacatgatggcgagggtgaggcacatcaacgtattcaccatattgtgaataccacccaacatgctgaatttgtcctgattggttttagctctgatgaaggcgtgaaacgtaacaaaggccgagtcggcgctgctgatgcgccagatgcgattcgtacccaacttgctaacttaccgattcatcgcccagtcagtattgtcgatttggggacggtgacctgtgaatatggcaatttagagcaagcacaaagcgaattagctgaacaagtcgcaaatagcctagaacatggcttaaaacctgttgtattgggcggtggacatgaagttgcatttggcagctttagcggtctgttccaatatgtacaagcccacgcgccagataaaaaaatcggcattattaatttcgatgcccattttgatttgcgtgaagctgagcatgccacctctggaacaccttttttacaggcagctcgtctttcagaacagtatcaaaaacaatttaattatttatgtattggggttgccaaccatgccaatactaaaattttgtttgatactgccgatgcgctgaattgttcatatttacgtgatcatgaggttaatatttttaacctaaacaacgtgcttgcagcggttgatgcttttattgaaaaagtagactgtttgtacgttacgattgatttagatgtattcacggctgcggttgcaccgggagtcagtgcacctgctgtcaaaggaattgatttagcgacttttgaagcaatttttaagcatattcaagagactggcaaaatcaaacttctagatattgctgagtgcaatccaaaatttgatttggacaatcgaacagcaaaactggctgcctatattgtttatcaatatttgttttcttgagaaacaatttttaatgtagaaatgaaaaagtgcactgagatcgctcatgtgcgcttttttttgactttctggtaaattaaagtcggatacggaatatagatagcaactataattaatttaattaaaaagaaaattaatttataaaatcatttagttaaaaaaatactcgatttttacactattttatatgctgcttggcacgtaatttgttttgtctttattttaacttcgttaaatatgtttggataattaaatgaaaaacagaaccttacattttgcttgtatcagtgttttattttggatgtctcattcttctaatgctgcaacccccgaaataaatacaaatactatcgaaaaatcacaatctaaacaaaagagtgatgtctctgttcgggtgaaagctttaaaccaacttttacaggaacagtgggaatatactttgaaaaataaccctgaaactgcaacgactttaggcgatttacgctacaacgatcgatggaccgagttttcaaaaaatcagattgagaaagataaaaaaactacgcaaaattttttaaaacgttttgaagcaattgatagcacagggttttcagcaactgatcaattaaataaagatttaatgatttatcagttgaaagaaacacttaaaaattatgatttgaaattgtatgagatgccttttaatcaaatgtggggcctacatttacaatttccgggatttattagttcgattccatttgataatgctaaacaatatcaagattatatttctcgtttaaaacaaatccctcttatccttgagcaaggtattcagttagcaaaacaaggacaaaaagacggcttgatgccacccaaatatttaattgaaaaggtggcaaagcagattactagcattgcgatgcccgcagggaaggacagtgtttttgcttctccattaaagcaatttccaaaaaacatttcgaaagcagaacaagaacgtttaagccgtgaaatactacaggccatagatcagaatgttcggcctgcttatcaaaaacttgggacgtttatacagaaagattacttaccctatggacgacaacacgagggtatatggagcttgccaaacggtgacgagctctatcgcttttatgtagaaaataatacgacaacctcggagagccctgaaaatattcatcagctcgggttaaaagaagttgctcgtatagaagcggaaatgctgaaaattgccaaagcacaaggtttcaatgatttaaaaagtttccaacaatctctaaaaacaaatcccgcggttttcccaaaatctcgtgaagaaattttagagatttatcgcggatatattgcccaaatgcaaccagagttgccaaagctctttggtttgttacccaaaaataaagttgaagttttacctgtagagcaatatcgagaaaaagaagcggcaggtgcggagtatcaccaaggcacgcctgatggttcacgtcccggacaagtatatgtaaatactggcgacttctctgaacgttccaaaatatcaatggaagcgactgcttaccatgaggcaattcccggccaccatatgcagattgatattgcccaaaacctaccaaatttgccgatgttccgaaagcaacccaaccatactgcctatatcgaaggatgggcactttacgcagagcaattgggtaaagacgttggtttctataaagacccgctttcagactatggaagactatcgagtgagttgttccgtgcttgccgtttagtggtcgatacaggtgtgcattataaaaaatggacgcggcagcaaatgattgattttatgcgtgaacactctgctttagatgaacctgatattcaggcagagacggatcgctatatcgctattcctgcccaagcattagcatataagatgggccaactcaaaattttagagctacgggaactcgcgaaacatgagcttggagaccgttttgatatcaaagcattccatgacatggttttaaatgcaggaaccttgcctttaaatatactcgatgcccgtattaaaaattggataaaggaacaaaaagcggcagcttaaaacaaaaatcgaaatttaggtcaggtcctcgttgggcctgatttaaaaaccgatagaaaacagaatataataataaaaaatatattttcgaaactagaaatggaaaaaaacctaaaagaatatcaggctattatttttgatttagatggcaccttagccgactcctttcatttttttctaagcgttttaaatcaactttccgcaaagtataagtttaaatcggtaagccttcacgaagtcgattactacaaacaacttacgcctagagaaattatgaaagagatgaacgtttctcggtggaaactgccttggattgcgaaagactttattcggttaatgaaagaaagagatgaagaaattcatttgtttgagggtatgcgggaccacttaattgaactgcataagcggggttatacgctcgcaattattacttcaaactctaaagaaaactgtcaaaatgtactgggtaaagaactctgtgagctttttagccatattgatggtggctcgtctatatttggcaaagcgaagcgaataaagcgtgttctcaacattttggatgtaagtaaaaaccaagcaatttatgtcggcgaccaaaccacggatggcgaagctgcacatgaagcaggtattgattttgctgcggtaggttggggttatacatcggccgaaaaattaaaaaccattcagcccaaagtcgtgctcacagacttggcaaccatgaaagaatttttctaaatacatgaaatacaggataatgcatgaataacaataacagcccgattggaatgattgactctggcttaggcgggttgtctctctttaagcatattcgggaggcgcttccgaatgaagacattatctatttcgccgactcgaaatatgtcccttatggagacagagaaagcgactggattgtttcacgaaccacgcatttaatttcaaacctagttgctcaagggaaatgcaaagcgatcgtgattgcttgtaacaccatgacggccgtagcggttgaaacgattagagcgcaaattaatgtgccacttattgcaatagaacccgccgtaaaaccggcagtagcaatcactcaaagtaagcatattgcggttttggcaactgccaccacggtaaagggtaaaaatttaaaaagtttaattgaaacgtatgcgcaagatattaaagtgtctttagtgccttgtattggcttagctgaaaaaatcgaaacgggcaaagcacataccgcggaagttaaagattatttaaaaaatattttggcgccgttggtcgagcaaaaagtcgatacgattattttaggatgcacacactatccatttgtttcagatacgattcaggaaattgtaggccgtgatattcaaattattgagccttcggaagctgtgacagcgcaattaatacggcagctcaatcaatatcatttaagttctgaaagtccaaatgagggaaatcatattatttggaccagttcagacccgttggaagttgcggatgttactttttctttgttatctgagaaattgtctgtaaaagctgtagagctataaaaagcccaataggcaattaatgcatatcgggcttaataaatcagttattaaagcaggtgatgccttaataatgatcttttttgaattactctacagttactgacttcgccaagttacgtggctggtcaacgtctgtaccacgtaatacagcaacgtgataagacaacaactgaactggtacgctataaatgattggtgcaagccattcgtttactgctggaatttgtacaacgtgttgacgatctttttcgactacaccgctattttcatcagcaaaaacgaataactcaccgccacgcgcctgaacttcttccatattcgacttaagcttatcaagcatttcgtcatttggcgcaagaatcacgattggcatttcagtatcaacaagtgccaatgggccatgttttaactcaccagccgcataaccttctgcgtgaatatatgaaatttctttaagctttaatgcaccttccaaagcgattggatagtgtgtgccacggcctaagaataaacagtgttgtttttcaacgaacaattcagacaaacgcaaaatttcagcatcttgcttaagcgtatcaagaatgactttcgggctgtgccacaattcacgagcaagctcttcaatcatcacattgctaatacgctgtttcacttgaccaattttcaagattaacaacattaatgcagcaagctgagtcgtgaacgcttttgttgatgcaacaccaatctctgggcctgcaagcgtcaataagtggtgatcagtttcacgcaccattgaagaagttgcgacgttacagatcgttaaagtctgaatgtcgatattatttgctttagcacgtttttgagtttcacgtagtgcagctaaggtatccgctgtttcacctgattgtgaaatacagatgtaaagtgtattttccacaatcactggtgagcgataacggaattcactcgcaatctcaacttggcaaggcacaccaatcaattgctcaaaccaatatttagcgatcattcctgagtgataacttgtaccacacgcaataatttgaacactttgaagtttactgaaatctgcatcagcatctttcaagaaatcatcacgtaaattgttgccatcaagcgcttgagaaattgtttgtttgattgcttcaggctgctcataaatttctttgagcatgtagtgtttatattcaccttttgaagcactgcttacagttgcatcaagttctttaactggacgttcaacacgttcaccttttacaaatacttcaattgaagtacgagtaagacgggcaatatcgccttcctctaagtaaataaaacggtttgttactggtaaaagggccaattggtctgaactgataaagttctcgccaatacccacaccaattacaagtggtgaaccttcacgtacagtaatgagttcatctgggtaatcgctgtgaataatacctaacgcataggcacctttaagctgaggaactacagattctactgcttcaagtaaactatcagtattttttagagcttctgcaactaaatgggctaccacttcagtatctgtttgagaagtaaatacatatcctaaagcttgaaggtcatctttaagctcttgatagttctcgataataccgttgtgaacgactgctaccttgcctgacatgtgcgggtgagcattattttcggtcggtttaccgtgtgttgcccaacgggtatgcgcaataccaattgctccagtaagctggtgttctgaaacagcatctgcaagattggcaactttaccaacacggcgttcacgtaaaatttgctggttattgagtaaagcaacgcctgccgaatcataaccacgatattcaagacgttttaaaccttcaattaaaatctcggttacacaacgttctgcaacgcctccgacgataccacacatatttcaatcctcttattttttaagcttttggggacgttgataatttgctttagaaatttgttgagcacgctcaaaggagagactttgttcagccacatctttcgtaatcacagaacccgcaccgactgttgctccattaccaatagtcacaggcgcaaccagcgagctattagaaccgataaaaactgcatcgccaatagtggttttgtgtttatttgcaccatcataattgcaggtgattgtacctgccccaatatttgattcagcaccgatctcggcatcacctaaataggtgaaatggttagctttactgcctagaccgatcgttgtatttttgacttcaacaaagttgccgatatgtacttcatttgccaatttagcacctggacgtaagcgtgcgaatggaccaatttgggtattttccccaacaactgctccatcaaaaacgctgtacgcttggactttagtgcccgctgcaatggttgtattttttaaaatacagcccgcaccgatttctacaaagtcaccgagttcacagtcgccttcaataatgacattcacatcaatacggacatcatgaccaacttttactgtaccacgtaaatcaaaacgtgcaggatcagcaaaagttacgccttgctgcataagttcttttgcttgttgcttctgaaattcacgctcaagtgctgcaagttgcaggcggtcatttacaccttcaacttcaaatgcgagctctggttgaattgaggcgatttctaaaccatcagcaacagccatcgcaacgatatcagttaaatagtattcgccttgtgcattttcatttgaaagcttaggcaaccactcatgcagttttgcattgctgacacagtaaatacctgtgttgatttcttgaatttgacgctgagcttcggttgcgtctttatgttcaacaattgcttggattttaccgtcttggcggacaatacggccataacctgttgggttatcgacatgtaaagtaatcatgccaataccggttttatttgatacttcaatcagttgttcaagtgttgtttgacggactaaaggaacatcaccgtataaaattaatgaaatgccgtctttaggaagtacaggtaaagtcatctgtacagcatgaccggtccctaactgttctgcttgttcaacccactgaatattttcttgtgcgaatgtcttttttacgtgatcgccaccatgtccataaatggtaatgatgttttctgctaatagttgttttgctgttttaataacatgtcctagtagcgggcgaccagctaaaggttgtagtactttagggagctgagaacgcattcgcgttcctttgcctgcagcaagaataatgacagtagttgacatgaataactcgaatgatttaactcaaatggataataattagtgtacaaagagcagcccatacaccggcaataatatcgtcaagcataataccaaaaccaccgtgtacttggcgatcaatgacgcgtataggccaaggtttccaaacatcgaaaattcgaaataatataaatcctgtaattacccaaatccaatttatttgttgtaaatagagcagaggaagaaaggtaatagattgacctgcaaattcatcccacacaattcgaccatcatcatgaacatcaaggatttttgcagtttgaccgcaaatataaatacccaccactgacatgatgagaatagcgattaaacttaaagtaaacccgagagataaccagatgggaacaaaaagtaaggcgaaagcagagccaaaagtaccaggtgctttaggagcaagaccagatccaaaaccaaccccacagaaaacgatgcagcggttgaaccaagacatgtctttaaaatgaatcggcggtttatgcaaagtgttggtatccatgaatttgcaatgggtaatctgaacccaaatgctcaaaagttagttttgtttgctcaacgatctgtccgatcattgtaatcttaacgtctagttgtttttgcaaaagtttttcataattttgcggtgttattgtaaaacataattcgtagtcatcaccacctgccaaggcatattgccaacgttgtcgttcttctagttgttgcagtacaggatcgacaggtaatttttccaggatgagtcgtgctccaaccttggatgcttttaaaatatgtcctaaatcttgagctaaaccatctgacacatcgatcatgctagaggcgagcccttttagctcttctccaagcttacaacgtggcgtcggatagtccagtctttgttgtagggaatgtcctaaatgctgaagcccataagcagcatcaccaatctgcccacttacacaaacataatcaccgaccttagcacctgaacgtaatacagcttttcctgtttcaatccagcccatggctgtgacggtaatggtaaggtgcggaccttgagtggtatctccgccaattaaggcaactccaaattgattacaacagtcatagattccctgactaaatccttcaagccactcatggtcaacttgaggcaagctgatcgcaagtaaaatactatgtggtttggcacccattgcagcaatatcagacagatttacggcaacacttttccagccaatcgcatggggcgaggtttcaagagggaagtgacgtccagcaacaagtgtatctgcacagatcaccagttgttgatttggagggggagtaattaaggctgagtcatcaccaataccaagcgcaacgtcaggatgtgactgacgattaaagtattgatcaataattgagaactcagccatagaacatcaagcctattattttgcttgttgtttttctgcgctacgcagtgtcgaacttaaacggtctaatacaccattgatgtatttatgactgtctgctccgccaaaatgcttcgcaagttcgattgcttcatcaagtaccacacgatatggaatttctagatgatcacgtaactcgtaagcacctaaacgcaaagttgcgagctctacaccatctagcgcgtcaatttcacggtcaagtaccggaataagtaacgcatcaaggtcttcgtgctgagcgataacttgagtaagtagttcgtgataatagttcaagtctaccttgtgcattgcattttcagcacgtgtacgcgcttcaatttcatgtacagggttgtgactcatttgccactcataaataccttgtacagcaaaacgacgtgctttacgttttgctgcataagcggcttgcagtgtttgagacatgctttaaattgcctttaataaattaaccatttcaattgcagttaaagcagcttcgctacctttgtttcctgcttttgtacctgagcgttcgattgcttgctcgatgctgtcagtagttaatacaccattgataacaggcaagctgctttctaacgcaactacacctaaacctttcgcacattcaccagcaacaaagtcaaagtgaggtgtgctaccacgaatgactgcaccgagtgcaatgatggcatcaaactggtttgatgtagctaattttttagcaacgatcggtagttcccatgcgcctggagcgtgaataacagtaatgttatcttcatttacgccatgacgttttaacgtgtcgatcgcgccttctaataagtgttcaacaacaaaactgttgaaacgacccactaaaatcgcataacgtccttcgcttgcgagatgtaataaaccttcaatacggcgaattgccatagcaacctcgattatttcgttgtgatttgatcagcagtgacatattccactacttctaaattaaagccagataaggcattgaaacgcaatggtgagctcagaagcttcattttttcaacacctaaatcacgcaaaatttgagcaccaacaccaatcgtttgatattgatgtgaaagtgctgcattggatttcaccggttttggcttagttaaatcatccaacgctggtcccaagtcttgcaaatgatcttgtccgatccagactaaaacgccgcggtcacttgctgcaatcgtttgtagcgcacggtctagattccaagccggttcaccgtcagctttatttagcttaagcaaatcgcgaacaggactaaaaccatgtacacgtaccgttgtaacgccttcttttggctcacctttgactaaagccaagtgaatgtcagggttacctatctcacgatagcgatagagctcaaatgaaccatattctgtttgaatcgttctttgatccaaacgttctacagtttgctcattggtcatacggtagtggattaggtcggcaattgtaccaatttttaggccatgcttctcagcaaaaatttctaaatctgcgcggcgtgccattgtgccatcttctttgatgatttcacaaatgacagatgcaggctcaagacctgccagtcgtgctaaatcacaacctgcttcggtatgacctgcacggtgtaatacaccacctggctgtgccatgagtgggaaaatatggcccggttgtacaatatcggttggtttggcatgtgctgccacagcagcttgaatcgtgtgagcacgttctgctgccgaaatacctgtggtaataccttcagctgcttcgatagataacgtaaagttagtaccatgctgggcaccgttctggccaaccatcagcgggaggtttaattgtttacaacgttcacggcttaaagttaagcaaactaaaccgcgtgcatgtgtaatcatgaagttaatatcttcagggcgtacatgcgttgctgcgatgacaaggtcaccttcattttcacggtcttcgtcatccattaagatgaccattttgcctgcacgaatatcggcgacaagttcttcaacacgactcagcggcattcgctttcacctttttttgtcgtaagacaatttctattgaataaatttcgcatagtttacgctgtttatagaattttgcctatgattctgatttatccaaatttacggctcaacatcataagtccggatttatttagataaataaatcataaagaaataaaattatttaaaataaataccataaatttagataaaaaaacctagccgaatggctaggtttaaatgcgcacaataaatttttaagatgctgcactactcgggctgtcattttgaggaattgattttttacccatcaaaatttcagttcgaatattttgtgcaagctctgcacattcagcattcataccattgatcataaatgcatgacgagtcatgacattacttgggttaggcattgcaacaagctgatagctgtcttgaattgctttaagctgttcattatcaaggtagagtgcagattctttcgcatgaagatgttgcgctaaacgttgagcagcttctttggcgtcaatttgcattgcttctacggcattacacacggcactgcgagtttgtagtgcaaagcgtttatcttcacggtaacgcttatataaaacgtctgaaagcaattggaaaaccgtacctaccataagtagacactctacagcgtgtggatgtgaagtcgaaatggcaagtgttgcgccctctgcatgaaactcgtctacgacatcaatatcagtcgctttcaaatgataatgcttcgtacatagctcaatactcttgtttaagaagagctgacaaagtttaaagtacggtacagaaacagactggttaacactacttaataactgtttagggtcataaaattgaatattaagtgccaaggtattttggtctgtagactctaagcttttttctggttgcgagcgaacaattggtttagctttagcttgctgctgagcttgagcaaccaaggtcactgtattttgtttttcaagcgcgagagcttgagttaactcttgaatctcatgttttaaacggttttcttcgttaatacgggctaagtattcgctacgcgttgggcgagcaatggcgcggtaagccagccataataaaacatgtaaaaacagtgaagctaaaatcgcaagccattgggtacgaagaatttccccaatacttggttgaattagtgtgatttcaatagaaccgacttttttctcgttttgaagcgcatcacgaacaaaaatttcaccttggcgagtttttgacatgccgcttgttgccaaaacttgtttattggcgtcaagaatacggatagatgccacacttggattggtcgcatagcgattggcaatcagagctaaagagaccgtattggcaggttcaagctcagataagctgtctgcaacgagttgactggtcatgagctgaccttgactcgcacggttttcattgagctggtgtgtcgttgcaatcaccaataaaaaggtatgcaatgcaaaactaatgatcagtaggctagcaaatagcccttgtctaggcgcaatcaagttaaacttccaaggcaattatattgaaattcgattatgattcttacaatagttgtcactcagactagagtcaattcatgcgagaaatcattcttatatcctttttaggaccggaccaaccaaaccagtttacccgattaatgcaagtactatccgtacattcattgcaaatactggatgtaggtcaggctgttattcataatcaactgacattgggcattgtggtcgcctctgaaaatgaaaccgcgaccgcgctggcaatgaaagagattttgattttagcacatgatattggcttaacagtgcgctttaaacctatctcgggcgcagaatacgatcaatgggtcagcgaaggtggacgaactcgttatatcgtcacggctttagcaccggaactcactgctgcacatttacaagccgttacacaaattgtgtctagccaaggctttaacatcgaaactgtaactcgtttatcagggcgtgtagatcttgaaaaagatagcacattgcctcgccgtgcttgtgtacagtttggtttaagcagtggtccgactttagatgctcaagctatgcgtgcagcttgtttgcttctttcaagcgaattaaatattgatgtggctgttcaggaagataacgcttatcgacgtaaccgccgtttagtctgcttcgatatggattcaactttaattgaacaagaagtgattgatgaattggcgcttgaagcaggggtgggcgagcaagttgctgaaatcactgaaagagcgatgcaaggtgagttggacttccagcaaagtttccgtgcgcgggttgctttactcaaaggtcttgatgcgtcagttttacctaaaattgccgagcgattgacaatcaccgaaggtgccgagcgcctcatttcgactttaaaagcccttggatataaaacggcaattttatctggtggcttccaatattttgctgaatatttacaagctaaattaggtattgatgaagttcacgctaacgttttagatgtacaagatggcgttgtgactggtgaagtaaaaggtgtaattgttgatggtgcccgtaaagcggagttgctgcgtgagctggcgaacaaactcggtatttcactagagcaagcgatggctgttggcgatggcgcaaatgatttaccgatgcttgcgattgcaggacttggcgtagcatatcgtgctaaaccactggtgcgtcaaaatgcaaatcaggcgatttcaagcgttggtctggatggagtactgtatttactcggtatgcatgataaagatttaagccgtgcttaaataatagtgaacaatcattaagcgctgctcaagagtagcgctttttttatgcagaatagtcataaaaacaagcaagttatgacaaaattatgcacagaaaaaaggcaataaaaaaaactgaaaaaaacttattttgagacaaaaaaacagcatagttttttgtaatgacacgccagaattgatgccatataggaagtagaacttttttaaatttacaaaaatgtaatgacaaaagaatgttgcgacaaagtatgtcgcatcgacaaataacaggtctttttttctaaaaaaaacatccataatgctttctaagcttcaacacaaatcatgaattaaagttgtttttggaatgaggtctggtgttcagaccgaatgtttttagacgttttcattaagacggaggtttctatggtaacagcgaattttgccgctatcgccggactcagcttaattgctgtcgcgcttgttgctgtgttcttttctccttaccgtcgttggcttggttttatgcttgcagggatgtttttttgggggctattggaagtggtccgttttggagttcaagtcacttttgaaatgccagtcacatatagttatttaactgcactaagtctagcgatggtaatggttacatttgttttattacgtgaggataaacaggcacagaaggctttggcaaatcgccaatatatagaacacacgccagtatatgaagatgatcagcagcaatgttctagccgataattcaattgttatctaacggtaaaaaggtatgcacagcatgccttttttatttacgaaaacatgatttttattatacaaagcatttattaaaaaatagccagttatgctacgatagactggtctgttgacgtttcatatatagattgcgttgccaattagaatatcatcagtcgatgcacgaaacaggcaatggtgagtccttgctgagttttgccccaaggttttcataaaaatacaataggcgtgaatgttcatgaaactttcttctatacctgtagtcaagttaccacttgttgatgtcagtacagacccgttagatttattggtagcaggtttggcgctgcgtatgaaacagttggcacgtacaagtcctaagtttattgagctagtgcatgaccgcgcattccgcattcaaattggtactgatttaggtgtggctcgccaaattattattaatcatggtcacatcgatacagttgctggatcacctgaaaaagctgactttattttgcagtttgcagatagcgaacaaggcgtaaaaactttactcaaaggtgacccaacagcatttatgacgggtatgcaagacggcagcattaaaatggaaggtgatttcagcttgctcgtttggtttaaccaagcagctaaattgattccaccaaaattaccaaaaccagtaaaagataaagtacgtcaagcacgtgcttttattaaagaaaaaactggtcgttaagatctaaaaaaaactcccgatcgggagtttttttatatctatgcttcaacttctaaattgaaagtgaccggtccatcattaatcaaatgaactttcatgtccgcagcaaaaatacctgtttgaacattttcaaactgtgaacgagtatattctactaactgttcatatagtgcttttgcgtcgctaggcggcatagccggaccaaagtcaggacgtagtcctttttgcgtttgagccattaaagtgaactgtgaaacaagcaggactccgccatttgcctgagatacattccagcccattttgccttgctcatcatcaaaaatacgatatttcaaaatcttgtcgatgagcttttgtccggtggcgagcgtgtcgtctcgaccgatccctaaaaaaaccaataagccatgctggatttcaccggtcgtttcaccgtctactactactttagcttcaagaactcgttgtattaaagcgcgcattgttagagaaagtttctgcaattaattgaatggatgcagtttagcagaaattaaattaaatgatttttaaaaggaaatttcatggaactgcaacaatggtataaaagctcgcaattcatctagaaaaatatgctttaatgctaagaagcaagcgaataatcattgactatgtctccaattatccattctttacttgatacagacttgtataaatttacgatgctacaagtggttctgcataaattcccgcaaacgcatagcgtctatcactttcgttgcagaaatttagaagatactgtctatccattagtggatattttggatgacttaaacgagcagctcgaccatttatgtaatctcaaatataaagaagacgaactacaatatttaagaaaattacgatttattaaaagcgactttgtcgattatttagaattatttcaactcaaacgccgttttattcatgcgagtatagatgaggaaggacgattagacatccgtattgaagggccaatggttcaggccatgatgtttgagatttttgttttagcgattgtaaatgaattatattttagccggattaaaacagatgaagtctgggctgaaggcgagcgtcgtttacaagcaaaacttgaattaattcagcaatacgaaaaatctcaacaaccgaatgatccaccatttttagtttctgattttggtactcgccgtcgttatagttttgaatggcaaaaacatgtagttgctgcatttcataacactgtgccaaatgtgttccgtggtacaagtaacgtcttgcttgccaaagagttaaatattacgccaattggaaccatggcccacgaattcctacaagcgtttcaggcgcttgatgttcgcttacgtgactttcaaaaagctgctttagaaacgtgggttcaagaatatcgcggagacttaggaattgctttaactgacgtagttggtatggacgctttcttaagagattttgacttgtattttgccaaattatttgatggcttacgtcatgacagtggtgatccgtacgagtggggtgataaagcatatgcacactatcgtaaattaaaaattgataccaaaaccaaaatgttgacctttagtgatggccttaatttgccaaaggcttgggaactacaccaatatttcaaagaccgttttcaggtgagtttcggtattggtactaatttgaccaatgacatgggccaaacaccgctcaatattgtattgaaactggttgagtgtaatggccagtctgttgctaaaatttcggacagccctggcaaaactatgactgataacgatacattcttggcctatttgcgtcaggttttccaaatcgaagagctggatgaagcaatttaattacaatagagcttaagtgcttggcagccacttaagacttgagaattttaatatctgattttctgctaaacactagcataaaatcagagtttgatagatataagcttatgctaagatgaaattaagctggtataaaaagtaaccatgacgatgacactccctgattttaaactcgatttattaatagaagcagaagagttagtgccttatttaggcaatgaatatatccgtattgttgatttgagccgtacatcagtttatgaacagctccatgttccgcatgctattcacttacagcctaaatggttagttgctcaacacgaagaagcgacaggtgttttaccggatgaagcaggtttacaagcgcttattgaaaaattgaatatttcaccaaatcaccatgtggtggtctatgatgatgaaggtggagcatgggcagggcgtttaatctggaatctccattgcttaggttttacccgtacaagtttaattaatggcggaattcatgcatggcttggtgcaggtttacccaccacagccgaggttgaagaattacctcgagttgataacttaattcagatcgatttatcacatgctgctcagttccgagtgaactatgaagaactacgcaaacaagttgagcaagaaagtgtgcaactctgggattgccggacgagtgatgaatatagtggcgtccgtttagcagcgcgacgcggtggtcacattccaaatgccctccattttgaatggagtactgcacttaatcgtcaaaatcatctaaaattgcatccgcttgaacgcacgcggcagcgtcttgaacaacttgggttcgatttaaaacaacctgtagtcgtatactgccagtcacatcaccgttctggtttggcttatattctggctagacttttaggttgggaagcaaaagcctatgatggtgcgtggagtgaatggggcaatcgcctcgatagtcctatcattactggagaatcgccgtcttgagttttacatctcgcttaaaaaaagaattatttattaaggcacaaaatcttgttcctcagcatcagttaagtcgtgtagtgggtaaagttgctgcaagtgaaaatccaattttaaaagctgctgttattcatgcatttaaaaccaaatacggcattgatttatcaattgctgaacaaggcaatgcactgaaatataaatcttttaatgatttctttacccgtgccttgaaagatggcgtacgtttagttgatgaaaatccggatagtattgtttcaccagcggatggcgcgatttctcaaattggtaaaattactgcaggtgaagtctttcaagcaaaaggtcaaagtttctctgtagagaaactcattggcgatccacaactggctcagccattccaagacggtgagttcgcgacagtttatttatcaccgcgtgattaccatcgtgttcatatgccgtttgcagggacattaacagaaacgttatatgtgccaggcgagctattttcggtaaatcaggtcactgctgaaaatgtaccgggattatttgctcgtaatgaacgtatggtgtgtttgtttgatactgaacttggccgtatggctgttgttctagtaggtgcgatgattgttgctggtattgaaactgtggcaacaggcaaggtaaaaccttcaggccgtatcgaattacaacatcatcagttaaagctagagaaaggtgctgagcttggacgtttttatttaggttctacagctgttattttatttgaaaaagataagatcgaatgggagcaacgttttaaagctgagtctgtagttgtaatgggcgagcgcatgggacataccatttagtccattatattgctccctaaaaacaagtaaaccctgactttaattattcagggttttttttgatttaaattatataaacctaaaatatataattatgttttgatttatattatatagaaatataattattattaagtgatctaaatgagtacgttatataagctagtgtataaatatgtatctggagagagcaaaaatattaatatgactgaaaattaataaataaaaacagaatgaaatatttaagttagacttaagtcgaggttttaattttatttgaagataagttattaaatctaaaaaaattatttagtttttttataagcatgaagcgctttttagatattacacaactttagccttggcacaatgcttgctaactattcaggaccttactgtaattttcatattttttaggttctgaaatcatgttaaaagttaaatgtctgacagcttcagttttatctgtactttgtatttcactcactcatgccaatgattttaaagttttaaatcaaatttcaaaacaacctactcaacttcaaactggggaatataaaggtaattattatgttccatctactttaaataccattacatggggctatttaccaaatcgagatgctaaacccgtgcttactgttccgtcgggtagtgttgtgacatttgatacggtttctcatgaaggtttgcttgaagaccaagggcgtaatgctgaaaagttctttcaatcgaaaggtgtcaaatctaatgaaatcttggaagatgcaaaaacaattacgcagtcaaatttaaagcatgattttcataaagatgggccgcatattgtgacaggccctgttgcaattgaaggcgcacagcccggtgatattttgaaagttgaggtacttaaagttgagccgcgtgttccttacggtgtgatttcaagtcgacatggtaaaggtgctttagtaggggagtttcctaaaaaagcaaagcaagaaaatgcatcggctgagcatcctgaacgttatggaaatgtatcgattttcactccaattgaaaaaaatgctaaaggtgaatacgaaggagtattaaaaacagaatctggtaaatcaatacgttttccgctgtatccttttatgggaattatgggggtagcagccaatacgtctgagcctgttcactctgtaccacctgcaatgtatggcggaaatattgatattaatgaactaggtgcaggttcaactgcgtattatcctgttcaggttaaaggtgcattattctatacgggtgatagtcatttcgcgcaaggcgatggggaagttgcattaacggcactagaagcttcagcccgcgccacgctgaaatttaccttactcaaagcaggtaaggacaaaataccgggcaaagagctaaaacaacctttagctgaaaatgctgagttttggattacaccaggacttgatgaagatcttgatgaagcgatgaagaaatctacacgtgaagccattcgtttcttaaaccaagaatacggtattgatgaagcgacagcgtatgcctatttaagtgccgcgactgattttgaagtttcacaagtagtagataaaaccaaagggatccatgcaaaaatcagaaaagctgattttaaagagtttgagagtaaataattgggatgacctaagcttggtatttaaaatattaaataccaagttaattttattttaactatttataagttttatatattttataattaagtataataaatctcacatatattgattagtataaaatctaatgcaatcacttccaaacgttctactatatcttgctgctttattaacattgtgtgccgcattacttcattttgtttgtgtgttctggggagcaaatggttttcggtttttaggggctgggaaaagtattgtccagatggttgaaagaggacactggtatcctaattttacagctataactgtgggcttaattctgactgtatgttctatgtatgccttctttgcagcaaagggaatacaggtattaccttttacaaaaattattttgtcgcttgttgcagcagtgtttcttatccgtggttttgcttttccatggttaaagtcaaaatttgtcggtaatagtgatttattttggtatgtcagctcagccttttgtttaatattgggcgctttatatgccgcaggcgtatatttaatttgaaatgaatatattctaggtgaactagagtgaataattttaaaaataaaagggagctgcgctccctttttaattatttagtccaaccatattttttgaaaatagtattgccctgctgtgaagatagaaactctacaaaacgtttagtctcagtgtcttttaaactatgtttagtcaatgctacacctgtgtcgcgatagacaactagctccggttcgatgggaataatttgtccaacatctgggttactgattccccaaatattaaagactaaccaagcatcatagctgctattttcttcccagtttttcttggcaatacctgtgttggctgcataggtggcaatattctttcgaaaagcttttgttaattgaatatttccggttctgccagcaatatcttcccacataccgacttgacctgcaccatgtgtaactaaaaccttaacgccagatttagctaggtctttaaatcctttaatatttttaggatttcctttgcgtactaaaatggctgcggggcgtaaatataaaggttccaccgaatcttttataatttgctcagaaaaagcattttcaaaatcagacatcatggcttcggaaccactatagataatatctgcatctagtttcgctttttcagaccattgagcagtaggaccagaattcacatgaacagctatgccggttttattggtgaattgtttggcggcttctttcatggcgggtgctgggccacccggaccatatacttgtacgtctgcaaagctatggatggatagagaaccgagaataagaaaaatcaggtagggtataaatttttgttttgacattttaatcgctatagtaattaagaaaatatcagcatatattttttatcattgaaattggattaatttttgcaactatatttatactggatatttttaaaatatagttttattaaatttcaatgattatatttcaatatatttttgaccgaatataaatatagataattttatggtaatttatattttataaattgattatttaaatagatgtaatgtaaataatagaggagtaatcccttgattagaaaaagtaattctttattaaaaattttatttagcagtatttgtttgatatctggttctgctatggctgctccaattacagatttgagtaagcaaattgtgagtgaaaaaccgggctcaatactttctatagcgcaacaagatgagacggatttatttctgcatgcagatcagcgcttattagtaaattatcgtagtcgaggtgtgaatggcgagcctatcgttgcctcagcgtttattttattaccgaaaggaacaccaccaaaaaatggctggcccgtactagcttgggcgcatggtacaacaggagtggccgatacttgtgcaccttcgggtgattatgccggtggaccagttcactcatatcaggaagttgcttcaaaagcgttagatggttggcttgcacgaggctatgcagtagtcgcacctgattatcaaggtttgggtactttaggcgcacatccctatatgaatgccaagagccaactgcatacagtagtagatgcagtgcgggcgttacatatgcttaagccaaaagattttaataaacagtggttggtaatggggcatagtcagggcggggctgcggcaattgcagtgtctgcctatggtcaaaaagatgctcccgaactagatttaaaaggggtaattgctcttgcgccaggtggctatcaatatgaaggcattgcagaatatgtgttgagtcatccaaacccagaaccaaatgtggcagcatttttcccaattgtgttattgggagcacaagccgcagagccaagtattattcctgagaatttagtcagttcagaaatgggcaaggtgctaactcaagcacgtagccgttgcctatctgaattacaatcagacttaaaaaaatctccttctagcatatttcgacctaatgtagatttaaaacctcttttgtcttatttaaaacagcagtctattgaaaatatggtgccgactgtaccattaatgattgttcagggttctaaagatcatttagttgacgctagagggacatacgcttattaccaacagctatgtaaatcaaaaaaaccaactatttatcaaacgattgatggtggagatcatcgcgatgcactacgtcagagtcatacttttgccactgactttctaaaccttatagagaaaaatcagacgaaatcttattgctcgaattttaaataaataggtttaaatcttataaaaaagccgacttttcatgagtcggctttttatatttgaagaaagatgattttaagtcatgttatagagtctttcttttggaaaaactgcggtaaaggttgatccttcattttctttagatagcacgtctaagtaggcgccgtgttgcatgagtacgtgttttacaatcgctaagcctaatcctgttccaccggtttgacgactacggtcgctgtccacgcgatagaagcgttcagtcagacgtggtaaatgtttagggttaatgccgataccggtatcttgtacgctaaagtaagcatgctcaccgtcatcgtgccagccaatggtaatggttccgccttttggtgtgtacttaatggcattagtaattaaattactaaatgcgctggcaatttccatgtctgaaccgatgaggtcacagtggctatcaatatgtaaattgagtgtatgcccataatcggcattgtaggcctgagcatcatcaaataattgattcattaagctcggcatttcaataatctgattttttgcgattttcttattattttctaaatttgataacaatagtaaatcattaaccaacgcattcatacgtttggtttgagattgcatctggtcaaatgcacgtttccagcgtgggttaatatcttcttggtcggtaaaggtttcgatataaccactgagcacggttaaaggtgtacgtagttcatgagaaatattatcgacaaagtctttacgcatttgctcaagattatgcatacgagttacatcgtatgccacaagtaagcggctttccccaccaaatcgtgtgagcttaacctgtacataacggtcatcatcaagattcgaatggagtttaatcccatcgggtgcctgatcaatattgttaaaatattcaataaaagtaggctggcgcaaaatggttaataagttacgaccacggtcaagtggactaattcctagtaaacgctctgcggcggggttccaccattcaatttgatgttgatcatcaatcaagactaccgcttcagcaagtgcaactaatgaagattgagcgcggtcaataagtcctaccatttccgcttgaacaatacgttcttggcgctgagcacggtaaacgttaaataataatgccccccaaattccgttgaggttcggagggacatcgtatggattattggcaatccagtcattgaccaaatataaagaacgcaactgaagtgtaaaaaacaccacaaaggcaataaaaatacagctccagaaatacccaattcctaaaccgactaaacctgcaataatcaggaaaaataataaaagtcgtaaatcttgtttagcaaacgtccataaactactgtagcgggaaagcttttgttcacgtacctgttcggggacggggtagggttcatacataaattttggttaacctgcggctaaatctgcacgtgttgagaaacgataacctgtaccacgtacagtctgaacaaatcgatctacaccaaaaggttctaagactttacgcaaacgacggatatgcacatcgatagtacgatcttcgatgtatacattaccgccccacacctgatcgagcaactgggcacgtgtataggcacgttccggatgggtcataaaaaatgcaagcagacggtattctgttggtcccatatctaaaatactgttaccaaagcttacgcgttggcttacaggatcaagaattaaaccattggcatcaattgttttttcaccgcttaatgcatttgctcggcgtagaacagctttaatacgagaaaccagttcacgggttgaaaatggtttggtcatatagtcatctgcaccagcatccagaccttgtactttgtggtcttcttcaccgcgagcggtcaacataatgacaggaatttctgctaagttttcatctcgttttaaacggcgacataagtcgaccccacttacgcccccgggtaacatccaatcgagcaagataagcgccggacgttggtcgacgataatttgatgagcctgtttggcatcttctgcctgtaaacactgaaagcctgccatgtccaaagaggtatggatcatttcgcggataggaagctcatcatcgacaattaaaatatagtcatctttcacagcgtaataccttgtagattttaacggtgaaccgttttgtagttatgacaggcttattacaaagattaattatgacaatttcattgcagaaaagtctataaaatcgaatttagcaataatttgtgacaaaaatacggcaagcgcatgaccaaatgatgacaggtaggtataaattttcttataaccattcagtgtgttacaagcttatctcaaacgaggtttttaaaacaaaaacactgtcaaaaaactttaatattattttgaaactttcgcgagcaaagctaaaaaaacgatacggcaggccgctaaaacttgctctagagactgcttaaacccgcccatcacccatcgaacggcaatttgtgtcacgtatccatttaaaccagtagcgattaatgagagttcattttcgttatgctggatttgcggcatggttagcatcacaaaagcttgaatcatacgatcaaactgggcgagagtttcctgaatggtggcctgattatgtaattcttggaccaaaattgcatcgacatacacaatacgagccaaacgagggtcgtcttttaaagtactcagtagagcacgtaaaccagcatcgaccatttgctcagggtctggagccgctttaatgacggcttgcatcaagttttgctgtaattcttcaatcatttttaaaaagatagtctggaataaatcttcactctttttaaatgattcataaaaataacgttcggtgagttttgcttcttggcagacatcttttaccgtcacggaaaaaaagccaagggttccataagttgcaataccggcttcaatgagtttttcgcggcgtgcctctttgcgctcagacagagataaccctttgaactgacgttctttactcacagtttttgttttctttttactggttgagtcgtttgtcgccataaataaatggtttcctaatttatcggtttttcggcaaatatgagccctatgataaagccgtcagcagaattgtgccaatctatctgaaattacagtgtactatattgacaatgtatattgtcaaaattatattgaaagagtctaaattgcacatgcaatgaaccagttgtgcaaatcgaaaaacaaaggatggacaatgaaaaattttaaaaacaaagtcgctgcaattacgggtgcgggttctggcattgggcaacaattagcaattcttctggcaaagcagggctgccatctttcattaagtgacattaatgaaaagggcttagagaaaactgttgagctattaaaaccgtacagtaatattactgtaacaaccaagaagttagatgtttctgaccgcgaggcagtaaagcagtgggcacaggaaactgttcaagatcatggctgtgttaacctgatttttaacaatgcgggtgtagctttaggctcaactgtagaaggtgcaacttacgaagatttagagtggattgtgggaattaacttctggggtgtggtttacggtactaaagaattcttaccgttcattaagcaaacacaagatggccatattattaatgtttccagcttatttggtttaacggctcaaccgacacagtctggctataatgcaactaaatttgcggtacgtggttttactgagtcattgcgtcaagagttagatattgaaaaatgcggcgtaagttcgctatgtgtacatccgggcggtattcgtactaatattgctaaagctgcaaaaatgagtgatagtttgagtagcttgggtatggacccaactaaatcgattcaaaactttgacaagttattgcgtaccccaccagaggaagcagctcgtcaaattttagatgcagttttgaaaaataaacgccgtttactcatcggtagcgatgcaaaaattctggatgcattccagcgtttattcccaacgggatatcaacgtgcttcaaccattgtaaccaaatggatgaaataaggtttaaaagaaaaaagccatcaattgatggctttttttataaggtttaatgcattctaaataagaactttgatcttctttttcttccagataaattgataatacaagccttgaataatacataaactgacaaatgccaacgcataggcgacccaaatgcctttaagcccccacatcgaactaaaccagtaagcacatggcatttcaataaataaaatggcagagatgttaatcagcatcggtacggttacagtcccactggcacgcataattgatgcaaaaatggcacctgcaccaaagaataaaattgcccaaagtacaataaataaaagctgttgccctaacaccaccacagttggatctgtgatgaataaagccatcaaatattttgaaaatagatagccgagtgcaattaaggcacctgtaaataaaaagttcattcccaaagcggtgcgtgtaacacgtgcgagtaggtccgacttaccagcaccaatcgcttgtgctgcaaagattgaggccgcgatagagatcgaaatcgctggaaattgaatatagttgagtacctgattcacagcaccatacgcagctgtggcatgagctccgaaacggttcactaaacccacaatgactaaaccggccattgaagtggtaatcatttgaataccggttggaacacctaggcgtaaaatgattttactcaatgccgaattatgacggatatgttgcaaaagctgacggtttggccgaagtggatgctttttcttatttagataaatcgcaagaaaaattaagatggcaatataactaataattgacgctatagccggtgcaataataccgagggcaggaaagccaaaataacctttcagcagaattggtgtaataattacgccgatcacgctggttaaagccagtgcaagtaaaggggtagtactatctcctacaccacgtaaaattgaggtatagataatataaacaaagagaagaggactacctgccaacatccattgcacataaggcaaagagaggtgcatcaccttcgggtccgtacctaaaagttctaaaatgtcgtgggcaaaaaacacaccaatgattgcggtaatgataccgccaatgatggtcataaatagggtagaacccaccacactttgaaccttttctatgtcttgtgcgccccaagcctgacccactaaaacagtggtacccgttgaaataccgataataaacgcaagcagtaaaaacaaaatggggaaatatacagaaactgcagcaatggcatcgacccccatcatttgtccaacaaagatggtgttaatggtaccggacaggttttgcaagatattggttgcaatcaggggcaataagaaaacaaaaaatgttttccaaagattttgctgatgaattaaagactgtcttggtggcatgtattctccatcgcccatctctttgatgagcgggtcggatattcaacttagcatagttgtagggaacttcttgtagtatttttactatgctaagtgactaaatttcttaacattgattcagaatttctcctgctttttgcagtgtttcatcattttttgcaaagcagaaccgtattaggcgtaaagactctggggcttgttggtaaaacaccgaaacaggaatagccacaatcttatgttgctcggcaagaaactggcacatttccacatcgtttaagtcaggtctaatctggctgtaatcaaggttttggaaataagttccttgcgatggtttaagcaaaaaacggctattgtgaatcgcctgattaaatcggtctcgtttagtctgataaaactgtgaaagttcctgaatatgttctgggtattgctgcatatattgcgcaagcgcaatctgacaaggtgttgtgccacagaaattaacatattgataaatctggcggaacaaacgcattaaatcaggtgaagcaacacagtaaccggttttccaacctgtgacatggaaggtttttccaaaagaaccaatcacaaaactacgttctctgagctcagggaaatgcaacgcgctaaagtgttgctgaccatcaaaaactaagtgttcgtagacttcatcagataaaactacaatatttttatcctgaattagttcaatgagttctaaccagtcttgtttggaccagattgtacctgttggattgtggggagtatttaccacaatcatacgggttttatcgttaattcgatctttaacttgttgccagttcaccttaaagtcaggtgcttgcaaggcaatatgtaccgctttaccacctgctaactcgacagaaggtccatagctgtcataactcgggtcaaaaataatgacttcatcacctgtgttgatgcaggcttgtatggcacagaaaattgctatggttgcaccgggcgtaatcgtgatttgagttacaggatcaagttgaagatgatcacgttgttgaaattgtaaagcgagctgttcacgcagtgcgagaatgccatcaccaggtgggtactgattgtgtccagccaaagttgcctgagatagggcttcgagcaaagcagggggtgcaggaaaatccgggaaaccctgtgaaaggttaagtgcacccaagcgctgtgccattgccgtcattgtactaaaaatagtcaccccttgtgcgggcaatttggactgaagctgtagcatattgttctcttaaggaaattattaacgttataaaattgattcaatcgctgctcgtattacacctagagttaagccgataaatgcacctaccacaacgccattcacacgaatcatgtgtaagtcgccaccgacttcgttttcaatttttccaatcatttcacgtgagtcccactcatgaatgcgctcactcacatagcgtatgattttatggctatattggtccgtaaagttcatggcaagtcctgtcatttctttgttgagaacttcacgtacttttacattttggacaaggttttcacccaactgctgaatggcagctctgaggttcattgcaataccagagtcttctttcattaaatcttctttaatggcatcgcataaaatagtgacagcgccactaatgaaatttaagacttgaggactatctagcaacgcatctttgccactatttagacgttggctggcaatactctcagggtttgccaactccagcatgagcgagtgggcaatagtttcaatttcctgtcgccatgggtgttcatggtcagccagcattgattctactttttcaaccagtgaatcaatggtgcgctgctgaacatcaataccgatccagcttgcaccttttgcaagagaccagacgcccagcgctttaaacatttttcttgtcaattcgcgagttttatccggattttgtaccacccactcatgcgcgatatcgagaccacgttgcagtacatcttggtggaaatcattttccaatactgcacgcagcatttcactcgcaagtttattgacttgagtgttacgcacccattgcacactgttgttttgcacgaaattggcaatttgttcttggctaacaaattcaaaaactttaggtacagtttgctgaatgagttgtaccacttgcgtattgttttgtggactggcaagccattggccaatggcaagacttaaatcggttttttctaggcttcgttcgaccacctgaggcgacaggaagttttcctgtacaaatcgacccattgattcggcaatacgtgccttattacgtggaataatttcagtatgatcacgcaaaaacttagggataggaagcttaccaaatgggtttcgaaacagaacggtaatcgcataccaatctgctagtccacccactacaccagcttcggcacctagcattaaaatatgaattaagtctgtgtactctggcagaaagcgattggcgatcaataacccaatccacagcaccaccacaataataagtgccatcgtagcgaaatatttgctgcgcttcagattgggtgcatggtgtacttcttctgccatattcatacggtcatcctattcatttttgttttactggcggctcaggtggcggcaacaattctcctgtcgggcttaaaccatatttttgtccgatagatttgagaattaacgttgcatcaaaggcatcttgaggagcctgcttttgatcccgataacattcaatagtatacgacacttgaacagggtcgatattgaccacttgtgggaaaccatagaacggatcatgccagaaacccggatagcggcggtagtaaccatatgggtaaaagcttggtgcagatgggtaaactacagcttgacgcggtggcttttggctttgattacttgggtcgttcagcactttaaaaaagcggaaacctttttgtactgtagtctgtgctgatttcactaaagtaatttcttcggctgctccatagctcatgtttgagtcagcttggaagctgattcgaaacgtttgagcatttaatggataggccgaaaactggccaagctgatcgaaagtttttggtttgctgggtatagttgaacaagcacttaaagttatggcagtgcctaaagctaaacaaagagagagatatttcatggtgaactcccagctgagcataaaagaatggatgcgtcagcattaaaaatagagaagtcttaaaaactactgttcggttctaataaaaattcggtttcctctggtgttgagacacgtccaaggatggcattgcgatgaggataacgtccaaagcgatctataatcactttatgttttttctcaaagcttaaattaatttcattgccaaggcgttgaaataattttaaagcaaactcatgaattagcttcgattcactatgcataaatggcatgtacaaaaacgagcgctgttctgggttaagttgtgcatcgagttgcaaactaattgcttcttgtgacaaggctaaagcaagaccgtcataagcaaaagattcgggttgatcacgataaatgttgcgagaaaactgatctagcacaataatctctgcaagacgaccttctggtgttttccgccaagaccaaagttctgctcgagttgcctgtcgatgaacgtctgtaaattgatcacgaatttttgcgtcaaaatcctcactttttgcaaaccagagtgaacggtgttcaggtgaaaaccagaagtttaaaatgtcttgatcgttcatgatattgacaactctttagcaattattcttcaataaaatcacaattctttcgtgtcttaaataacaagattgtgataaaaattgccaaactgaaatgatgtgatcatatcaatagccgtatcatgtcacgattttgtatatagtgatcttttataagcgagcaaatgcatgagtcaacccactacaccatctcaatcagttattcctgcttgggtggattcgtcgctactacaaggcatgttacgtggaatagaacgtgaaagcctacgtatgcaaagtaatgggttcttatcacaagagttacatccaaaagcattaggttcagctttaacacatccgaaaatcaccacagattattctgaagcgttgatggagtttattacttcaccacagccaaccattggtgatgccttgcatgagctcaccgatattcatgcggttgtgcaccgtcatttagaaaatggtgaaaagctctggccgttgtctatgccatgtatgctagatgacaatgaagaacgtattcgtctagctcaatatggcacttctaatattggccgtttcaagacgctttatcgccgtggtttaggtattcgttatggtcgccgtatgcagacgatttcgggcgtacactataatttatctttccctgattctcttttttctgctttgcaggcacatgaaactgacgaaaaattaaaagcacttagtctgcaagattatcgtagtcatcgctattttggacttatccgtaactttattcgtttaacgccactggttatgtttttagtgggagcgagcccatcggtttgccgttgttttctgacgggtcatgaacatcatttgttgcctttaatcaaagggtcatattatttaccgtatgctacagctctgcgtatgggacgtttaggctaccaaaactcggcacaaaaaagtttaggcattcactataacaacttaactggttatttggatggtttacaaaaagcagtacattctccatacccgccatttagccgtttagggttaaatgatgcctctggtgaaccattgcaaattaatgatcatgttttacaaatcgagaatgaatattacagtctcgtgcgtccaaaacaagttcctcaagcgggtgaaacaccgtctcaggccttgaaaaatcgaggagtgggttatgttgaacttcgtgcagtggacgtaaatccatattcggcaattggcgtcaatgaaacaacagcaggtttccttgaggcattagcgctttattgtttattaagcgatagtcctgaactgttatgccctgagcaagatttgattgagaaaaaccagacagaagtggttaatcgtggtcgagcaccaaacgcaaccattactgatttaaacgggtcttaccatattgaagattgggcacgtcagcatatttctaaaatgcaggattgtgctcgcttactcgatcagacctatgcaacagatctatacagctcggctttggctgtgatgcaagaacgtattgatgaagtagatgaaacattatctgctcatgtgattgatgacacattaaagcatggtggaacctggagctttggtagtcatatggcacagttacatgctgaaacttatgaaaagcatgagattagtgcagagactttgcaatattttgaacaattggctgtgcaatctttacagcagcaagaacaacttgagcaagatagtcagatcagttttgatcaatatcttgaacaatatagataaaaatgaggttttacatgcgattaagttaccgtttggtgagtggactgcttgttctggcaagcattgtcggcatgtcttttgcgttgtatttggaacatgtaaaagggttggagccatgtccgctctgtatttttcaacgtgttggcttaatggcaatgggttttgtggctcttattgcgtttttgcataaccccgtttccaatgcgattaaacgcttttatgcatttttggcaggtgttgcaattttatggtcagtgggagtggcgggccgacatgtttggctacagcatttaccaccagatcaagtaccaagctgtggtccgggtttaaattacctcattgatgctttaccaatgaaaaccgttttacaagaagtactttctggctcaggtgagtgtgcggcaattgactggacttttttaggtcagtctttaccagtttggtcattggcctatttccttttactgttattggtttgtttatggcagttattccgtttttatccagtgtttaagacggctaaaaagtaagtttaaagtaattaaaaaaggctcaacttaagttgggctttttttataactttcgaataagtgaaaatataaaaaaattgatagaaataacgcataattttgtagacagatagttctgttttttataaagtgcagccgtttatatatccttatgattataaaaaaatgctttttaatatatttagtgtcttggaaaaaatagggctaaatgctcagaaacgtgctattcacgtacaattttctaatgaactactcaatcatcaagtattcttacaacgtatagaaggccaacatcagctaaatggtggcctaatggcagaattgatctgcctttcaaccaatgcccaaattgcattgaagcaatttattggtgttcaagtcgctgttgatcaggtcactgattcggggcaattgttccgaactacaggtattgtgactgaggccagttatggacaaagtgatggcgctttaacgctttataagctgactatagaagatgcgacaaatttatggcacaaacgccgtaatagtcgtgtttttatgaataaaagtatcgtagaaattaccgaagttctatttaaagaatggcaagaaaaaagtccactgtttgctgcgagtttaagtcttgatttgggtgggttaagtcaaaactatgatattcgtccgttcactatgcagcacaatgaggctgactatgactttctcacacgtttgtggcgaagtgagggggttagttggctcattgatgaatcagagctttttgtccctcattttactgcaccaatacaagctcaaaaactaagattaattgatgacaataaccaataccaagctttagcgcgtcgtagtattcgctatcacagaagtagcgcaaccgaatatcaagatagtattacaggctttgttgcagtgcgaagtctgcaaccgactgccgtacatgtacagcgttggcagcccgatgcgttagcgcaagaagagggtaatggttcagttgttactacccatacacactcagataactttgattcggccactttaagtcttgagcaagcatggcacgtaagccccgcctggatgcaagatttaaaaggggaagatcaggcaaccgcttcaagcagtagccaactagaaaaattaaatcagcacttcaccgacatgcatgcgagccgggccaaatactttaaagcctacagtagtgtgcgcgatacccaagtcggctattggtttaatttaagagagcaccctgaaattgatcagcatgaaggggcagatcaagagttcctaattattgctaaaaacttctataaccaaaataacttacctaaagatttacaacagcaagttagccagttattaacccaaagtcgttgggatcaacatgggtatgatgatattgagcgtcagggtaatgagctgacattaatacgtcgtcaaattaaaactgcccctgaatataatccagaacagcatcgaccaattgcctatccacaaagagcgaaagtcgtgggacctgagggagaaactattcatgtcgatgaatggggacgtattaaagtacgttttctatttactcgtagtgatgatcatggccatgacggtggtgcaggtagcaatgacaatgataccgactcggcttgggtggatgtactgactccttgggcaggagaaggttatggggcacgtttcttaccacgtattggtgaagtggttgtcattgacttctttgatggcaatatcgaccgtccatttgtgactgggcgcatccacgaagcacagcgttcgccaactaaattcgatgtaaaagggcagcttcctgatactaaaaagctaagtggcatacgcagtcaggaaatcaatggaagtggcttcaaccaattacgctttgatgacacaacagggcagatcagtactcaactccaaagtagccatgcggcaacacagttgaatttaggtaatttaagccatcctaaagaacaagcgacaagccaaggccgtggtgaaggctttgagcttagaacagacgcttggggagctgtgcgggcgggtaaaggcatgctcattagtacctatgcacaagagcaagcgattgcagaccatctagaggccgcacaagcacaatccttactttcacaaggttatgaaagcatgaaaatgctcagtgaagttgcagccaagcaacaaactgatgctttgaatgtaattaatcgcttacccaaattcatccagtctcttgagttaaaaaccacagggcaggcattaaatagtacggtaaacctattcaaagaaggaattaataacgatcctatccatgccctaaaagactgcggtggctttattcaagacattggtgcactagggggaaatgcaaaaggcgttgtagatgaatttaattctttctttagcgatgctaaagatgcggtagaaaatttaaaagcatttatcgaaaacgttgaagaacatggccctgatattgttaaaggaaaactcgcaagtattaaagaccgaattcataaaaatccatttgaaagtattcaagaggtcgggaaagtcttaacaaatgtcgagactaaagactttgatttgatgagtacgtgtggaacttttagtaaaggcagtaaattggaagtatcaccttctaaagcattgagttctttacaaggctttatggaaggttatacccaaggtttagaaagcagttccgatactcaacaacaagagcaaggcaaaatcttcagacaagcccttatgttgttagcatcgccaaatggtattgctttgacgacgcctgaaaatattattctacaagcttcgcaagatattgccgaaagtgccagcggttcaattaatttgagtgctcagaaaaatattattgggcatgcacaagacaaaattagtttgtttgctgcgcaaaagggtttgcgtgcttatgccgcgaaaggaaagctcgaactacaagcacaagatgatgctattgaagcaattgcgaagaaggtgattaagcttatttctactgaagataaaatcgagcttacgagtccaaaagaaattgtattaacggcaggtggttcacagctcaaaattaatgccaatggcgtattttcgacaacaggtggtaagtttgaaagtaaagctgggcagcatttgtttacggggggagccaaggtttcttatgaggttcctgagttaccaaaaaatggaccttatgctgttgattttttatttgctagtttagctggaaatggtatagaaaatgcaaaaatacagctgtatgaaccagacaaaaaagaaattatttgggagggtaaaacagatttaagaggaaaaagtaatttatctctccagaatgagtcaaaacgatatgaagctctgattggctttgatgattggtcaagtatatttgatgatgaagatgattatgaagaagaacatgaagaagaatttgaaataggtgagcatggtatgcaagctgaagaaaataacttagaagaataggtataatttatgtcaaaaatttatattgttaaatcaggtgatacactttggggaatttcaaaaaagcatcatatctcagtaaaagagttagctagaattaattcattatcaggtagaatgattcataatcttagaattgggcaaaagatttatttacaaaatgatgtaaataacactaataattttgaaacccaattaaaaattattttgatggacctttcttttaagcctatattaaaagctaccattcaattagagtttgatggaaaaaaaattattagaaatacaaaaaatagtatttttgaagatataaacattcaagatcattcgaaaggattaaaagtttttttaaaaacttaaatggtactttcgatttaattgccgatcataaagtgcttccattagggcggaaagtattaaaattaacatcaagaaaaatgaaagtagaaggttcacattatgcaaaagatggaatattaaatgaaacagttaatcagattatgagtaatttaaaaaaggttggaaaacctatagttgaaagcatatctactacatcgaataaagatgaattgaaaaataagcaaccaccactcaaaatacctgaagaaaaaatagagcaaaagcgtaccgataatggtaatagtacccatataattgctgcacaatttacagaagataactttttattaaagccagttaataataaatatcgagcttatattgtgaatgcagctaaaagacatggtttcacgccccactctttagcagctgttattgaagctgaagcagcaaaaataaaaaagacaggtgaatggaatactaatagtaaagcaaactcgagtactgcagcaggattgacccaattcttagatgaaacatggttagctatgtgtaaggataagagttcattagttgggcaatatgtaatgaataatcctaaactaactatacagcagaaattaaatttaagatttaatgcggaaatggctattgatgctgccgcagcctatgcaattagtaattttaaatcatctggtttgccctatcaaaaactaacagaaccaagttcaatcgctaagtttgcttatttgttacatcatgaaggagctacaggaggtaaaaattttgtactaaacactttaagtcaggaacgtgcaaaaaaattactttttactcaatttggaaagaatggcgctaagcaagctgcagattttttaaaccggtataaaggtgatgcaaaggctgcttatggagcatggctgagaaattatattgatgggcatataaatatttatcaatatgttgtagataagagcaagacttctggaataaacttaagtacggatgaaactataaagttattgaaaggacaaacaatttccactcctgctcctaaaatatcaactaccactaataatcaacaagtgacaaatgtcagtactattgaaaaatctgaatctaaaattagaattaatacttcccaagccccaacaaataatgttggaggagataataagtggcataaccctttagcagattgcaaattaagaacagcaggtttagcgaatgctaaaggtgcaacgtttggtaaagtaagaaataatggtactaagaatcaccagggtgttgatttacaagctaatccaggtacgaaaatatatgcagtctgcggtggtgttattgcatttgctggggcaactggtggtgcatatggtaaagtaattgtcttaaaagttgatataaacgatttacctgaaaagcaaaagaaatatgctcaaactaaacttacaaaaaataaatatgtctacttcttttatgctcatttatcagttattgatgtagataaaggtgatccagttgatactggcgaagtaattggaaaaactggtgcaacagggaatgctaataaaatgaccactatatccaaaggtgcccatcttcattttgaagccagaagcgctcccttattaggagtagggttagatggaagatttgacccaatcccatttataaatgcgaatttaccatattaattttgaggtacttatgaaagttttaaattcttttgcaataatgatagcttgtagtgtttcttttaatatttgttatgcaaaagaaaatagcgagtggaatgattatttacaagattctacccaaataaattcacctatagaatatatagattcttataataaatatacagttctaaatcctaatttaaaaattaaattagtggattttggtaatattaataaaattaaaaaagatattaaatattctttaaaaaaatatggagttcaaattttaaatcggaaagaggtatataatatttttgaaggtaaagttcctttaaaatctaatgttgactttacattgttatacaatgataaaaatattgtggcttttagaattcgggaaaatagtaatatagattatgtgaaagaaccatataaaaattttactgcaaatgcatatttttataatttgataaataataaatttattgaagtaccagttttgaattcagatagtgaggataaaagtaagtcgaccgatatcttacaaggagatcagttaacatatgattcaaaaaaaggacaatatatttatctagcaaatataaaatcttataaaacaggaaaaactcaatctataaaaactatttttaatagtaatttaaagtgtatttcatctactttaggatgtgagacaataggggttcttcctgctacaaaagctaattagtgtaaaaagcccaacataagttgggcttttttttacgtctctacaattccttctaaatcttcgagcgtatagttcggcatatcaataatatgggtttgaataccgtcttgtacataatcattcacatgaggatataaccagcgagtaatctgttcggcaacacttgagtgatactgaatttcaaagtgatttaagccataaaacaccgctttatgtgaatctggaactttaagctgaaaacgtggattaggatgttcacctagtgcgctttttacactcactaagtaatcgccaatcacggtaagcgctttattacgcaccttttcaaactcgagtgttcctgccactaaaaaggtattgatatgggaaggtagaggagccggagcacggttgtcatccatcataccaatacgggcatccatgtattcccagtcatcatctcgaacactaccatggcgtaggtctaaaatcccattactacggatattaaccaactgaccaattaggccaacaaatggaaaagcgcctagccgatcttgtaacgcaaatccaaaacgctcaagtactgcaccgtggtggggagatccaatacagacgaggttttcgaccatatgaatccattggtacatattttgtttaccgtaaaacagtgcgctacgggaaactagtccacccatactatgaccaattaaatcaatgctggtaattcttggattacgctgtactaaatcttctaataaatttgagaaactgcggccattggctgaaatacggcggcctgtattgtaatttaaatacagcatcgtgttgtgatcacgctgtgctaacagacgctcaccaatcccgccataatgcgcatttgaccaagtaagatggttcatgcacaaaccatgaaccaaaattacaatacggcctgcaagttcgccttgttggattgcaccgtagtggtcgtatagaaccattggcaaggcgaggggactgtgctgtttaagtagatagtctccgaaaataccatttaacactcctactaaaaaatgaagggttggtgttaatggcttctcatgaagggttggaaatttttcaataatacgacgtaaccctggtgctaaaaaacaactaccatatttttgtaaggcaccataagaaaactgatatgccttttggacagagggccgtttttggaaatttttagcattttgggcactaataccaaaagcattttttaatacttcaatattaatgacttgtattaattcatgtacaccatttaagctggtactgaacagttgagctaaaccttctagtacgtcggcctgactaggtggcgtacgatcccatttacaataagtttcatgtaacggtgttaagctcggcatatcttttccccatttacgttataaccgacgttttaagctgtactttttatgaacggcagctaacgtttccatcttagtagtttaaataacacatgtttttaaaatactgatgaatggtaagttgagtggtttttcttgtctgacaatagtgtttttatatacaaactgagaacaaaaatgtgagtttattctcaatttagagggaaaaatatatgaatattatctacctccatggctttaatagtagctcttcttcaattaaagggctcagccttaagcagtattgtagcgaattggacataaatgtgcatttgccagatttaaatagatctccggaacaggtagtagcacaggtttcagagctgattgagtctttacaagaggtggctttagtcggcagtagtcttggtggtttttttgcgacatattttgtcgcgaaatataatattccggctgtactgattaaccctgctatgcaaccatggaagctgtttgatgagttatttcaagttgaaaacatgccttataaggtgaacgatcaatggtcaattgatcatgttcagttacgacagttagaacaactggaactgaaacagcctgaaaatgctgacaaaatactcgtcttgttgcaacaaggcgacgaaattttggattatcgtcaagcacaacgctattatagtgctgcaacaccatcctcattgattttgacggatgctcatggcaatcgtgccatggaagattttgaagaaaaattacccttagtgatcgaattctttgcgcacaccatcaaataaggaaaacgtacaacgtgacacaatatacggctcaatcgcttgaagttctttccggtttagaccctgttcgtcgtcgtccggggatgtataccgatacttctcgtcctaaccatttagcccaagaagttattgataatgctgtcgatgaagccttagcaggtcatgccgacaaaatctgtgtcacggtttataaagatggttcgttgtcggttgaagataatggccgtggtatgccagtcgatattcaccctgaatatggccaaagtggtatcgaaatcattttaaccaagctgcatgctggcggtaagtttagtaccgataactatcagttttcaggtggtttacatggtgtggggatttcggttgtaaacgctttatctacacgtgttgaggtagaagttcagcgtcagggtaatttataccagatggcctttgagcaaggcgaacctgttgcacctttagcggtgttagaaggtaaagcacctaaacgtgcgacaggaactacggtacgtttctggcctgaagccaaatattttgatagcccaaaatttgctttaaaagcacttaaacataatttaaaagccaaagctgttttagctgctggtttaaaaatcacttatatcgatcaaattaatgatgaaaaaatcgaatggcaatttgaaaatggccttgtcgattatttgatggatgaattgcaagaccgcgaaattttgccaaaccctgcatttgtaagcagtgggcaagcagaccgtgcggcatgtgaatttgcgatttgctggaatgtagagggtggcgaacaggttcaagaaagttatgtcaacctgattccaactgcacaaggtggtactcatgtgaacggtttgcgttcgggggtgactgaagcgctacgtgaattctgtgagttacgtaatttattaccacgtaatcttaaactttcggctgaagatgtttgggatggcgtgaactatattttatcgcttaagttccaagaaccacagttctctggtcaaaccaaagagcgtctttcgagtcgtgaagctgccaatatagttttaaatattgctaaagatgcgtttgcgctctggctcaaccagcatgctgaaattgccatgcaacttgctgaaatggcaatttctaaagcagggcgccgtttaaaagctgcaaaaaaagttgagcgtaaaaagattgtttctggcccggctttaccgggtaagctggcggactgcgtgggccaaacacgggaagaaagtgaactctttattgtcgagggtgactcagcgggcggtagtgccaagcaggcgcgtgataagaactttcaggccatcatgccaattcgtggaaaaatcttaaatacatgggaagtttcttcagatgaagtacttgcttctcaggaagttcacgatattgccattgcaattggtgtagacccgggtagtgatgatttatctgaattacgttacggcaaaatctgtattttggccgatgccgactcggacggtttacacattgcgactttgctttgcgctttattcgttaaacattttccagcattggttgaagaagggcatttgtatgtagcaatgccaccattgttccgtatcgatattggtaaagatgttcattacgcgctagatgatgaagagcttgaaaccattttgaaaaatgttaaaggtaataagaacccgcaaattacccgattcaaagggttgggtgagatgaacgcaattcaactacgtgaaacaacaatggatccgaacacccgtcgtttggttcagcttgatctagatgatgcacatttaacggcaggtttactcgacaagctccttgcaaaaaaacgtgcagcagatcgtaagcagtggcttgagcagaagggtaacttagctgatatcactgtttaattaaagtgtgcaggataattttttataaaattatcctgcacctgacaactcatatactttattgaaaataattaatttatgagtaattttcttaattttaggcgatcctttatcttttgatagccatacttctaaaaaagctgtcttattctgttctttaaagaacaaatgttttcctttggcggttgtttatcccctctgctgctaaccatacacttcatataaatcatcgttatggtgttttagtcatctcagtttttccatgaatttatgtaattaatttgcaaaacgtattggaacaggatgaaagggaatttagtaatactttagctctctttacatctcatgtggtgactcatcgctaataggcccttgttccgaacttggctagatcgggtatagccaaagaatgattaaagcgtctgcacaccatctttaaatatgaaaaggaaaaagctatggatctccaactgaaaggtaaaacagctattgtaactgcggcaacagcaggcatcggtctagcaattgcgaaaactctggctaaagaaggaactgatgtcatcattacgggccggacccaagacaaattggcggcggcggtagccgagatagaagcaaatgctcccttgggcaaagtatgtggttttttagctgatcttagtacatcagagggagttgagacattaatttcacaacacccttacactgatattttagtaaataacttgggatattatgaagccaaaccatttactgagattacagacgaagactggtggcatatgcttaatgtgaatgttatgtcaggtgtacgcttatctcgtcactactttccaaaaatgttagaaaataattggggaagagtgatttttatgtcgagtgaggtaggagcattcactccaccagatatggtgcattatggcgtaagtaaatctgctctattggctgtatcacgtggaatggccgagttaacaaaaggcacaggagtgacggtgaacagtgtacttccttctgcaacacgttccgaaggtattatggactatttacgtcaaactgctcctcgtcccaacatgacagatcagcagattgaagcacatttttttgagatatatcgtccaagctcattgattgcaagaatgattgaagctgatgaaatcgcatctatggttgcgttgttagcaagtcccttgggatcagcatctaatggcgcagcagttcgtgttgaaggcggaaccttccgttccattctgtaatactcaaagcttaggttggcgtttgaagcgcacgactctgttcttacgcggccattggcattttgatcactaaattaaaatagacagatttgtctattttaatttagacagtaatttttatcggatggggaaattgaaaaatatcgcaatttgcaccgcctccaattcgatccactactgcaaaatcactcggcgcttcaaaggtaagcaaaggatgatgccaagtacctgcccgataattgatactttgcttgccatccgaaacaaaagcgcatagttttgaaatatcaggagtattttcgtctaaagcaggcgccacaacaattaaaaatttttgttgctgtaatggaatgaatgcttgagagcctttcggatggcgctctagcattgaaatttccataggtaacacactggccttaatatttcggaaaatactaattcctgcctttgcttcgccttcaatttcagtttcgacgagcgcatggtagcgctcggtgtgtgcatcattaatatgaaaaaaatcatgcccgtcacaacaaatgacttctccgaagggctgaaagttctcaatggttaaaggctgaatttgaatattcttcatgatcatgacttggcaatttttccccataaacggacacggctaataccaccatccggaatcatattaatacggatatgcgagactttttcatgctgtaaaatttcattcatatattcatgaatatggtccatttgcataggttgggcttcaagtaagtaagaccaaaacatactttgtggaatcagctgtgcatcggttgcattttcaaggtagaccgcctgaatagaaacttcagcaggaaagttacctttaaaatgcgccgtatcaatttcaattttttcaatttttccgcttttacctaatgcaagaatacaccagtcataacctggtgcacggcggcgtttggtttcccacccatcgcccatgttgacgccacggcctgggttaatcaaattacgtggatgtccaaagtgcgcatcgctataagcaattacacgaccgccattttctaaggccaataaatcgagagtctgctcgtggtcggtcacctgaatatgaacgtcaccataaacgcgtaaacgggcaacaccaccatctgggaaaatattgagtcgtatatgcgtgaaaattgcatcattattgaccataaaaatatgatgttgactcggccctagctcggtattttctaaaatactctgccactttgccccagtaaggtcaccatttggtgcataacatgcctctaatgaggcagaagcaggataatttcctgtaaaaaacgtggtgtcgatatcaagtgcactgatttttccactcacacctagtttcacaatacaccagtcatagcctgcatgacgcttacggcgggtctcccaaccgtccatccatttgccatgatcatcaaatttatcttcaacaaaaataggtgcttcaaattgcagcatacgctttgcttctgcaaagaaatcatctgaacactcaatcacttgtgcaccaattcgggcatctgccaaatttgttttagtattcaaaatttcagggagttcaaaagctggagcgtgcaatgttgccataatggagtatccgtatttcttgttaaaaacatgatttttcatttaaaactgcactcacactgagcgtgttgagatgagttttatacataaatatataagcatggtgcatgccagttttgtggaaaagctaaataaattttgaacgatggcatgtttttagcataagcaccctataggtgaatatctataggagcgtgttatgaatgtggtgattattggtgcgggaatgggaggtctaaccacaggcattgcattaaagaaatttggtcaccaagttcgtatttttgagcaaactgaaaagattcttccggtcggcgccgcaatttcactgtggtcgaatggggtgaaatgtctgaactatctgggattaaccgagaaaatcgccaaacttggtgggcaaatggatgacttggcctatgtagatggtttaactggagatgtgatgacacaattcagtttacgaccattaattgaagaagtaggacaacgcccttatccggttgcacgtgccgatttacaaaatatgttaatggatgagtttggtcgagatcagatttatttaggcaaaaaaatggtcagccttgaagataaaactgattttgtagaggttcattttgctgatggtagctcaacacaggctgatttactcataggggcagatggtacgcattcaatgactcgggcctatgtgttaggtcagcaggtacaacgtcgctatgcaggttatgtgaactggaatggtctggttgaaatatccgaagatttagcaccagctcagcaatggacgacttatgtaggagagggcaagcgcgcgtctctgatgccagttgcggatggacgtttttatttctttttagatgtacctttaccagcagggttagagaataatcgggatgaatataaaaaacttttaaaacaatattttgctaattggtgtcaaccagtgcagcagcttattgagcgcttagacccgcaaaaaaccaatcgggtagaaatccatgatattgaaccgttcacacagttttataaaggtcgtgtggtgattttaggtgatgctgcacatagcacgacacctgatattgggcaaggcggttgccaagctatggaagacgcgatttatttagcgcggtctttgcaaattaacactttgggactagaggatgctttacgccgctatcaaaacaagcgtaatgaacgtgccaatgaattggtgcttcgtgcgcgcaaacgctgtgacgtaacgcatatgaaagatgaaacggtcacgcaggcatggtatgcggaactacgccgtgaacaaggcggacatattatgcagggaattattagtaatattgtgggtaatccactcgattaaaaacaaaaacagcaaggagttttccttgctgttttatcttctaaataaaaattttagaagtggtatttaaccaatgcactgacgttattttcgtcggcacctttaataccaaatttgttattccacactgagtgctcgataccgaggtatagacgtgtatcaggagaaatgtgtttacctacattccatttccattgagttgtccagttcaactcactcgcatggtcatcttcagcggttgaccagtctaggaaaccatcaaccaagaaatcttcagatgcgattttaaatggaatgccataaacgaatgtcatttgataatcgtcgtcagttttttcattgttcgcacggtagaagtttaaattcgcatattggaaatatgggatatctaaatcaactgcaaaaccatacaagaagttgtcaaagttattgccgttttgagtattactttcccaagtggtactaatgagcacatctttaattgggccgtatgtcaattttttgccagaaacttcacctaagcttaaacgtggtgataactcaaagtaagtacttttatagtcatcttcgccacgcatacggtccataaagaaaaatacatcagcatatttaacttttgctgcatattccaaagtaatcgtagtttctttgtcatctacaacttcatagttttcaccataaagtccagtcacactaaaatcttgccagattggttttgcctgaaccatggcagttgcagataacaaggcacaagtcgccgcaagttgctttaattgcatttaaatgatctccccccaaataaagcacgctaaggatacagggtcttaagcaaaaatgaagccaaatttgatcaacggttaaaaaaaagcccaccgaagtggggcgctaaaaaactaactcattaatgtgtatttcgtgtgtttattgtttggcttaaatgaggggtacgcgagctgcgaaatgaaggtaagtgattaaataacaaattcaataagatagcaaagatacaagtcgaactaatacccgaatggaataaagtttgtacccaaactgggaaatgagcataaaattcatggttaataattggaatcatcccagctgataaagcagttgccacaataatcaaatttttctgatcgttataatcaatttttgccaaagtgcgaataccactcgctgtaaccgaaccaaataagaccaaacccgcaccaccaagtactggcataggaattgccgcaataaggcggcccataacaggtaatagacctaaaataatcagaatgactccgcctgctgccacgacaaagcggcttttgatacctgtaattgccaccagtccaacattttgggcaaaagcactttgcatgaatgaaccaaagataggagctatcgcacttgaaaacatatctgcacgtacgccgttggcgatacgttttgaatcgacttgggttcctacaatatctccgacagcaataatatcggctgtagtttccgtcataatcaccaaagtaacgattagcattgataaaattgcacttagctcgaaagttggtaaaccaaatgcaaataagtgtggaaattgcagccatgcgcctgagctcacctgactaaaatctccaaaacccataaagtaggcaagggtagtaccagcaacaatagccaacaaaattgataaacggcgaatacttgcttgtggcagtatatttagaataatcacaatgcctaaggtcagcaaagctaaagagatattctcgacgctaccccaatcaggtgctttgttgttaccacccatcatccagcgaatcgcaacgggtaacagagataacccaataatcgtgatgacacatcccgtcacaacaggtggaaaaaaacgaataatttttgagaagtaaggcgcaaggcatagtccaattaaagatgcggcaataaccgcgccgtagacagcaggtaaaccaccgcctgtagtgataatagcaaccatggttgccacaccagcaaaagacacaccttgcaccagaggtaattttgcccctagatatttggttccgatggtttgtatgagagttgccaacccgcctacaaatagggccgctgcaataagcattccgacttgtgctgcgcttaagccagctgccgttccaataatcagtggcggggctacaatgcccccatacatggtgagcacatgctgtaagccgtaagcaaaacttttggaaattcctaaatattcatgctctggagaaatcgcattcttttgctgatgattcatatttttctcctatttatatttgagttagctgccgcgataagtggaataagcaaacggactaataagtaatggaatgtggtaatgctgattggtgtcttctatgaaaaattgaatacaaacacgggggaaaaaagttttgatttgctgtgatgaaaaataaggggcaacttcaaattcaagttgataagcacctttacctaagttttttattccaaaatcactcactcgcccatcttggttggtaattgcagtcgctatcagttcatgagtggctgcatgaaacaacttcacttcgacctgtgccgccggtttacctaaattcgtatctaaaatatgagtgctgatcatgcttgtacttcctgagatagacgtaatagagcaattgcagcgagttgctcatgtacaattgttttttcaatagctaagttgttttggagacgttgatggagtttttttaaaatctcgtcgctactgaggcctgcggctttaattagaaaaataaaaccaaacttctgctcatactcgatattaccttgcagcagggcttgttgtgtttgttcatctaaggaaatgccagcttgttcttgggctgaaaaattttgctcttttgcattgagctgtttttttgcctgtctttcaccaatttttggatgggtggctaatgcggcctgaatctcttgccatgaccatgtgtggcttaattgttctgcataccctaaaagaactgaagttgatgagtagggacgttctgaaataattttttcggcccatacaggaatatggacgcagttgtttaacagagtcttgagttggtcgggtggggcttgattaaactcggctaaaaacactgttattcctaaactcgttgtcgtgatatagagttttagcaataacagtgccaagagtgatttgagatttgcttaagaatttggaaaattaataatcaattattgatttatgtgatttttataccaatattctgcaatatcctgacggcgacatacccaaacatgatcatgcatttcaatatagtctaggaatctttgtaatgctttaaaacgacccggacgccctaaaatacggcagtgcattccaatagacatcatttttggtgcagtttctccctcggcatacaacacatcaaaactatcttttaaatattgaaaaaactgttctgagctattaaatccacctggtgagcagaacttcatatcgttacattccaaagtataaggaataatcagatgaggtcgtgatgcacccgccgtatcggtaagtgtggtccaaaaaggcaggtcatcaccataataatcagagtcgtattgtatttgcgggaactctgcaagcaactgacgcgtattggggctatcacgcccggtgtaccaacctatggttttatttccaaacaagttttctaaaacagataaggcttgttccatatgctgtttttcgacttcaagatcactctcttgataatgaagccagcggtagccatgagaaaccacatcgtaatcggcttgtttaattgcctctacaatataagggttgcgaacaagtgccattgctactccgaaaatggtcatggggagcttgcgccgttgaaactcactatgaatgcgccaaaaaccagcacgtgaaccatattcgtacatagagtccatcgacatatgtttggctgggtaacttgcagcgccaataatctcggataaaaactgctctgaaccttcgtcgccgtgttcaatatgtttttcgccaccttcttcataattcagcacaaattgcacggcaaccttagcattattaggccatttcacctctggaggctgtccgtgataaccgattaaatcacgtgaataaggagacttttgaatctgctcaataagttctgctccagatagataagattcggacacaattgctctccttttgttcaatttttcataaaaatttaaaaaatcagcttgcatatttttatagatggactgatattgaaggtatgaagatcttcaaaataaattaaaagcagtacgtttaagtcaggagataacaaaccattacaccatcaaaatgtacaattgaagtcagttcatgcatgcttaaaacatgccaacataaaaaagttttgcatagaaaagatccacagtaagaaagagaggatggtatttatgaatattgaaatccgcacagataaaaacatccataatagtgaacgtttaattacttatgtacgtgcagaacttactcaagaattccaacgtcatagcgaacgtattacacatttctcggttcattttagtgatgaaaatggggacaaaggtggagacaaagatatccactgtatgatcgaagcacgtccttctggcttaaaaccagttgcagtgcaccataaagcaggaaatattgacgcttcaattcatggcgcgattgaaaagctaaaacgtagccttgaacatacctttgagaaaaaagaacacccgagaggtagtcaaccagaattcattgatgatgaagtttaaaaaacactaaaaagcccttcggggctttttttatgaatacgtaaaaagtccaataaaaactcttcacaactttaggtttgcaatgcaatagcgttgacctctaaaatcttcagtagagattaggcataatagcgctaatatatttttgagagatggtcatgttaaccacccaacagcaggctttaattaaagccatagaagaattagaactcgcgcaagtacaaaaattacttgctgagggtcttgatccgaatttcattgatccggaacaaggaccgccagtgtccattatttgtgatggaatttttaaatggtgggaagacgtctctgaagcgtatgaagcggggactccattatcacaagaagaaaaacagcaagccctgcaagtttatctcgatattcttgaagccctcattcaggcaaaggcaaatgttcatctttgggatgcagaagagttttatggtccactatgggatgcagcaagttcggcatgtgcaccagcagttcagcgcttgctagatgaaaaagttgatccaaacacacgtgatgaagaaggactcaccattttatcttcaatcagtcagttgttctttgattgtgattttgatgaaatagattggtcagaagcgcttcaagaagagcgtgaaacactagagttattgcgccgtcatggagcaaaaatgtcaaaagaattaactacttgattggataatagaatgagaacatttcaaattttaacttttgctctgaccgccgttgctgcaggaagtacttttgccgcagagttctcgtttgatcgtccgggttcaggctttggaacaggcattacaccagttggtaaattagcatgggaacaaggtttaccaagtgcaacttatacagagtcaactgttgatggcgttaaagaaaaaacagttactgtaaatgaggatatgttattccgtacaggtttagctgatggtttggaattgcaattaggctggcaaggtccggcatggactcaaactaaacgtgctggtaaaaaaacggataactcaggttttggcgatgtaagcatcggcttaaaaaaagcgattgatttaaatgatgaaaatttaacaatggctgtattggctgaagctgttattgcaacaggtaatgatgagtttactgcccatgacgatatatatagtttaagttcagcagtagcttataaatataatgatttgttggatacttctattaccatgcgttatgaagtacaaaacagtaactgggcagtgactgcaattccaactatcaattataagattgcgggcaaactctcaggatattctgaatttgtttatcgtaaagctgaaagccaagactaccaatatggtttaggaacaggtttagtttacgcagtaaataaccgcactcaacttgatgcaaatattggtgtggacttagaaggtcaagataagagctacaaaggtggcttaggcatggcattcttattctgatcagactaacttgaactcattattattgatgaaaaagcttatttctcagggaattatttattttctagtagccgctacttttgtattgagtcagtttgtctttgcagaagataagttattgtcacccgaacaggctttttcattttcggttgaatcgccacaatcgcataccgcaaagttatcgtggaagattcagccgaattattatttgtatcagcataaatttaccgtacaacagggcaatcagcctttaactttaaatttgcctaaagcagtttctcaatatgatgagaactatggccaaagccaagtttattaccatcaagtcaacttccagattaaaaccaagccttcagagcactacacagtaacttggcaaggctgtgccaaagaccgtatttgttatcctccacaaactattgagtttcaaactgacgcagatggtctggtcggtctgcaaaatcaggcaggtgcagcaccaaaacgcttattagatttggcaaatacacaagcatcaagctctacggagtctttagagaatcagagttcagctactcaagctgaaggagctgctccggagattgcccaagatcaggtttggtcagcaaagttaattgaacactcgctttggtatggtgttttattatttttaggtttaggcatgctgcttgcatttacgccatgctctttaccaatgctgccgattttaacctcgttgatcattcgagatcacaaaggtttaaaagcttggacgattgcacttacttttgtgtgtagtatggcattggtctatgcaggtctaggcttgattgcttcttcagcgggtttaaatttccaacgctggctacaacagcctgctacccttattgcgtttagtttgttgtttgtggtttttgcactaaatctgtttgggctttttgagcttcggttaccgcaaacttggttaaatcgacttgaccgtattcagtctatgcaacaaggtggcactttagtaggtgctggagtcatgggtgtggtttctgcgctcttggttggcccatgcatgactgcgcctttggctggaactttattatttatttctcaaacccagaaccaatggcaaggggctttgcttttattctgcctaggttttggcatgggaatccctttactcatcgcgagtgttttaggtgcaaagttcttacctaaagcgggcgactggatgcatcagattaaagtaatttttgcttttctgatgttagggttaagcctttatttcattcgccctttattgccagattggggcatgcaagtgcttagtttattgctagggctggcttttattatttatgcgctgtatcagttcttttggaaaaaagggcagttacagtggctttatgcgctcctacttttattggtaacgccatttgtggtttataaccagtatcaacatattcacaatcgtagcttacaaaattctgagcatatggctgagtggcatgtggcgaccacggcagcagactttcaaaagattttagtagcagctcctgctgatcgacctattgttgttgatgtctatgccgattggtgtgtggcttgtcagcctattgaacatcgtattttaaaagcatctgaggttcagacggctcttgcaccttactatctcattaaacttgatttgagccattatgaccaatcacatgaagctctactcaagcagtggaatattcttgggccacctacatatctctttttaaacaagcaacagcaagaaattcgttctttacgtttaacaggcgcatttagtcagcaagagcttttacaacaactggcaagcttatcaaaagttaaagattcaaattgatttgatctgaggtagttggtgaaaagtgcgtacttgattacgcccagaggcctttaccgcatagagggcttgatcggcttgtctaatcacgagataggggtcatttgcaaaagccgaactgctgatgccaaagctggcacttacatgaatttggatattttgattattgaagatagtcaattcttgtaaagcttgtcggcaacgttcggcaattttttctgcttgaataatatcggtatgaggaagtaataaaataaattcttctccaccaaaacgtccaataatatcttcattacgtaagttttcagaaagacactgagcaatttcaatcaaaacctgatcaccttggtgatgtccgtatatatcattaatttttttaaaatgatcgatatcaagaagtatcacggcataatcaaattgctgttcatgaagtgcttcaagatgggtgtttaagcttcgtctatttaagacattagttaatgggtcgatttggcttaaacgttgaatataggtttctcgttgacgccattgggtcagcaatatttcaaataaaataaaacacgccactaaaatgggcataataaaaaacagcatacttcctagccaaaatggattggtttgggcatgacgcatcgctgtaaaattaaataggggagcatatgaaataacccccgtcatacttaaatatgtacataccgctagaataatagttgcaggtataaaagcgctataaacaatttttctttcaaataaaaccaaacctacgccaatagtgcctacgtaacccaccattgtggcagggctgatacttccaattaaatatccatcgtggcacaacatcagcataaaggcttgtacactaattaaaggcacaattttttgcgcccaagcttggtctttgtagcgataacaaggaataatgagtacagctaataaaaataaggtcagtaaattcagccagatttgtgattcaactaaagatagatttgcccattgccaaatactaggagtaattaaaatatagcctttccataaaatccaactgaaattcattgcgcaggcgagggtaagcattaatgcgcttttttgtaatggggtccagttaataatgtgattgtgatggatgaaatcgagaatcacctgttttattttatttataggacgagtgattaaacgaattttcataataataaaggaactcctaaatagagatgtctcttcgtcagatcatcctaaagagggagagtttgaaggattcataacctaaacataccatgattcataaattaaacctcatgatttggattgtgaaaaataagaagaagtgacaaattttaaatttgtcacttcttcattttgattacgtcttatcaagttcatgagcaaactcagcaatatccgccatcgcctgttttgcttcttcgaaccaagcattaaacatttggaagttatgccacatgcctgtgtaaagtttaaagtgtactttgacacctgcttcttcagctttctctctaaaacgtttggcatcgtctaataaaatttcttttgaaccgacctgaactaatgttggcggtaaaccttctaagttatcgaaaataggtgaaacacgcgggtcatctgccgcaatatgattgccaatataatgttgaataccgatctgaagagcttcaagagaaagtagggcatcatgtttttggttaaatcttaaagactcactggttagggttaaatctagaaaaggtgacaataaaatcaggccacttggcataagttcgggttgttcttttaaacgtaagcaaagtgccaaagccaaattagctccacaagagtcaccagataaaataatatctttaggctggataccttgaactaataatgattgatagacgtcatataaggcctcagttgcctcaggatatggatgctcgggtgcaagtggatagtccacatgaataatttgcatttgggtacgagcagccaaatctgtcatgaacgcatgatgtgtttttaaacttcctaaaaaaaaggcgccgccgtgaatatgaaaaataagctgggtcgctgaatcttgagctttaatttcctcacccttaatgccagcaagtcggattggtcgaacagttacatttttttgttttggaaatgctcggcaaagttgttcaagcatagggcgcagagcagttgggggtaaattcaactgacttggtttgcgaattgctgttttaagaaatgtttctgtgaaataatattttaaaacattaggtatattcatatagtatccgcttatgttaattacttgtttccctataaattttatttttcaaggttacaaggttacacgaaacagtcacattcaaaaattgcaatatcgttgcgagttttgaatactgaagtcttggaagacccaaggatattacaaaaatgaaaaagattgctttagctttaggacttgttggtatggctgcatttgccaatgcggctgacccactaaacggaacggtatggaaaacgattgatgaccaaaccaataagcccaaagccgtagtaaagtttacggaacagaaggatggaaccttaactgcaaccattcaaaacattttgacaccaggtgaagaaaacgcttgtacaaaatgtgaaggtccgtataaaaacaaaccgcttaaaggtgtgaccattgtacataatctaaaaaatgtaggtggtaacagttatgaaaacggtacaattttagacccgaaatctggcaaaacttacaaattaaaaggtgagttggctgagggcggtaagaagcttaaattacgtggttatattggcgtttcagcattgggccgtaaccaaacttggattcgtgcgaactaaaagcttaaataaaaaacgagccattgggctcgtttttttatgcgcttaagttttgataggccgtttcgtcaaagcctaccagaaaccctttagaggtctgtagaactggtcgcttgattaagcttggctgagcaattagcgcctcaataagatgatcttcactgcttaaagcacgcgtttgttctttttcagatagttttttccacgtagtacctttcttgttgagcaccgtatcttgtccaatttcttttagccagatttttagagtatcagcatcgatcccttgttttttataatcgtgaaattcgtagctcaaaccttttgcttgtaaagcatcaaatgcttttttcatcgagttacagtttttaataccataaatttttaacattttatcggaccatgtcaaaaagaaagaacacacagcctaacccaaaatgcatttgagcactactttatacagatacttttaaaacaaatgaaaaataatgattaaaacaataaagaatgtcatgttattgtcataagacaaggtaataatgagcttaataagaataaattaaaaactaaaagaacgtagcgcaaaaaataagagatagaaaagagaaaacccgcatttaatcatcctgatcatgcgggtctcatttcaacgtccattgtcacatccttgcaaataaacttatcttaagtttattttatcttcctacggcgtcctatccttttgcgtcatcctgactgcttccctgtgccgtggggctataatgccgttaaacatgtgtaagaaaaatactcaaaagcgacatgtgttgtaagcaaaaacgacaatgtaagtgaacatgtgttcacttattcttgaattttatagtcgataataactggagcatggtcactaaaccattgatctttatagacccatgcatttacagtgcgcgctttccagtctggtgaacatgcgtgatagtcaatacgccaacctacatttttcgcacgcgcttgtccgcgatttgaccaccatgaatacaattctgcttctgttcttacaacacggaaagtatcgacataaccaagttcatcataaatgtggtcaagccaagcacgctcatgtggtaaacagccagacgacttttggttgccagaccagtttttaatatcaatccgtttatgaacaatgttgtaatcgccacaaataatgatggacttattctcatcacgccattgtttcaagattttggcgtattcacctaaaaataaatctttacgtgcttgcgcttcttcaccacttgagcctgaaggtaagtataatgatgcaatatgtacgggatgtgacaaacctaaatcgaattcggcagaaatgaagcggccttgactatcggccaattcaaaccctaaaccatctttaatagagacaaagggtaagcggctataaattgcagtacctgcgtagcctgcacgctctgctggaaagagatgggtatgccatccctcgggtctaaatttctcagtccattgttcatgggtaatgcggctttcctgcatgcatacgacatcggcatctgattgttctaaccattcaagtaagcctttcgtcactgaagaacgtaagccatttacgttaatggaaacgactcgaagaatttttacatcacttggatactgatcctttggtatcatgcgaaaatttaacctcaattgtgaatttggagcacctcatgacaacgcctgtgtcatttcacccgcaagcatttatcgaactcgcattatcacgcggtgtgcttaaatttggtgagtttactttaaaatctggacgcgtgagtccttatttttttaatgcaggcctactcaacgatggtgaagctttatctcttttagcacaaggctatgccgataaattaacacaatgtgaaaatgttgatgtgatttttggaccagcttacaaaggtattccatttgtagctgcgactgctgttgctttatcgcaaacacataacaagagcgtgccatggggctttaaccgtaaagaagcaaaagatcatggtgaaggcggtgttttagtcggtgctgcggttgaaggtaaaaaagtctggatcattgatgacgtgattaccgcaggcacagcgattcgcgaagtggtaacgattttgaaaaatgccggtgcaactattgcgggtgtgttggttgcgctagatcgtcaagaacgtgggcaaggtgaactttctgcaattcaagaagttcaaaaagaattagaaattcctgtgcatgcactgattaccatgaaagatttaatggattatttagaagcgaaaggcgaaaaagaagcgctagcaaacatgcaagcttaccgtgaaaaatacggtatctaaaaacaaaaaggcatacctctaaaatagggtatgcctttttaatatttacttaaaactgataattcaaacgtaataacacattacgtggtgtgcctggcatgctgtccgaacgccagtactctttattggttaggttatttaccgcaagtgtgacattccaagggtcggcactgtagccaattgctgcatcgacacgattgaagccttccatttttacttgattattaatatttgaataataagacccgacataggtcacgcccacttcggtataccactgttcagttggtaaatagcgaacaaataaattacccgtatttttagaagtgttggctaaataattgccttctcgctcagggttttgattgtcttctttaactttggcatcggtatagccatacccaccgcgaacaaagacattatcaagtacacggccaataaaactaaattcgagaccacgagattgatgttgaccagcagttgcccaaacctctggttcactgtcagggttcggtttatagcgaatattatttttacgaatatcaaagacagaaaattgagtatttaaacgattatcgaaccattcactttttaccccaacttcatattgctcgttatattgaggctctttatccattttcgcgacatcggtacttccagtaacttggttaacacccatttgtccaccaaacggtgcgaagcttttagagtaagacgtataaaagctatgttcaggaactggttgccataccaagccaacatttgggctaaaagtactgtcttttacattacgatgttcattcttaattttgttagtagttgaaaagtcgaagtaatcgtagcggagtcccatcataagtttaagttggtcatttagaccaattaaatcttgaataaatacgccgtaagttgtgccttcattatagttatgctgactaatctttaatgggccattgccacgactgtactctcgttcaccagtgattggattaacgtaaccataaatagctgatccattttgagttttattggctagacgtggctctcgttgttcataagtccagtctgtaccaaccataatttggtgttcaagttggcctgtcttgaacttgcccttaatatcaaatgtattggtggtggtcttattgctggtttgttgccagtagtaaatttgatcgatgtaacctttttttgtacacgcctcattctttgagttttttccatctaaaccacaataattgccaaaataaaagtggtcaaagttctgttctgcttgtcggtaacttgccgcccagtggaagttccaatcaggcgcatattcataattcacatcggtacgaacgacttgcaaaatatcatcaacataatcaccgtcttgggcaaatcccattttaatagaagttcccgcaggcaagttgtcacgtgttggtccacggtcaggtacacgatttaatttgtcataggtatattgtgtggtccaggtcagctttccatcgtcattcttataggtaaagcttggggaaaacatctcaatcttattttcaataccagagcggaagctgcctgcctcgccatattctccagtcaaacgcactgctaaattgtcattaagtacttggttgatgtcagcggttgttccgtagttatcgtatgaacccgcatatgcgccaactgaacttttagagtcaaaattggcgaatttactcaccatatttacaaccccgccgccagcactacggccatataaaaccgaagcagggccttttaaaatttctatacgttcgatattggctgtactgcggcgtacttgtccgctttcacgtatgccatcacggtaaatatcacctgtatcagcaccaaaaccacgaatcgtgatcccatcaccacgcatatcgtaactggttgatacccctggtgtaccttgcagcatgacgcttaagtcattcgatccataaattttatatttctgaacatcaatggtatcaacggtttgagggatatcttttttatctaaaccattacgagtgacattggctttgtcataatcgatatagcttttaatcgggtcgagctcactcatggcctcgatttttatggttggcatggtggctgcggcttttgatgagaattcaatcaattcctcggcgttagcaccttgaatatttaaaatcattaaactgagtaagctgagcgggaatgaacccttaatttggggagatgatatagaaattcttaacataaaaataaaatcaattaacaaaaataaaagtataaatgataattataatcatttaattgtttagaataaaagaactattaacttaaaaaatggcatatttattttttattaactgatttttaggaagttaattagcgaattaaaggacttattgagttgactcattagtttttcttgttaattaggttttagagggggctttttattgataaaaatgccccctctaaaatcacgcattatttttgagaacatctaaaatatccatttctggatcataatttttgtcaattgttttgcaaatcgcttggcctacaatgacttgagagccattaaaagtcatagtaggtgcttcatagagctcccaaccatgattaagtgctttagtcactcgtgcacaaaaagcagagtcatcaggtccggttaaatagcgataaagtttcatctttagcctttaaaaataatattttatgggagtagtttaactgaatttaccttaattcaagataaagaaataaccgataaggttttactaaaattaagaaaaacgagtgaaaaatctcagctatactcatgctaatttaaattttaagaagagcttgagcatgcgtgtacttgtcgtcatggatccgattgaaaccgtaaatctgaaaaaggattcaaccatggcaatgttgtgggcggcgagccgtcgtggacatgagttaggctatgcattacaacaagatttatatatcgatcaaggtaaggcttacggtctcatctctccgttaaaagttttcgaagattacaaccattattatgagttaggcgaaaagaaaaaagaatctatcgcggcttatgatgttgtactcatgcgtaaagatccgccttttgacatgaactttgtctacacaacttacgtgcttgaacaagctgagcgtgaaggttcatggattattaataagccccaatcactgcgtgactgcaatgaaaaattgtttgctacgcaatttcctgaattacaggtgccaacacttgtaacatcgcagcagagcttgattcgcgaatttattaccgagcacggtgatgtgatcgttaagccacttgatggtatgggtggtatgggtattttccgtttatatcaagatggtgtaaatattggttctaccttagaaatgcttacggaattaggcacccgcccaattatggctcagcgttatattcctgaaattgtagaaggggataaacgaattttaatggtaaatggcgagcctattccttactgtttggcacgtattccgcaaaatggtgaagtgcgcggaaatttggcagctggtggcttaggtcaagcgcgtccactcacagaaaatgacaaactcattgctgctaaagttggtcctttcttacgtgaaaaaggtttggtatttgtaggtcttgatgtaattggaaattatgtcactgaaattaatgtgacaagtccaacctgtattcgtgaaattgatgcgcaatttggtacatcaattgccgatgacctatttgatgtattagaagctggtcgtccagcataagggtctatttcgggtggtttcctaagcttattattggaaatcacccgaaaatatatgaattaataaaatcacaatatgaaatacgctagcgctttgtaggcatattttcaaaaaagcacatctttctgttataaacgagtgaaattcgcttttcgttaatgaagctttaggattaaaataaacggctacaaaaatagatgacaatttccattgttttttgagttgaagaattagaccgtgaccgattcacagcaaagcaaacctaaacatgtcatgatgatggctgccggtactggtggacatgtttttccagccctcgccgtagccaaacaacttcaacaacaaggttgtcaagtttcatggttagccacgccaacaggtatggaaaatcgtttattaaaagatcaaaatattccaatttatcaaattgatattcaaggtgtgcgtggaaacggagtgatccgtaaacttgctgcaccttttaaaattttaaaagcaacttttagtgcaatgcgctatatgaaacagcttaaagtggatgctgttgcaggctttgggggatatgtggcaggcccgggtgggctagcagcgcgtttattaggtattcctgttctcatccatgagcaaaatgcggttgcaggatttaccaatgcacagttatcccgtgttgctaaagtggtatgtgaagcgtttccaaatacatttcctgctagcgaaaaagtagtgacaactggcaatccggtacgtcgtgaaatcactgatatcttaagtccaaagtggcgctatgatgaacgcgagcaagcgggtaagccgttaaatattttaattgtgggcggctctttaggtgcaaaagcactgaatgaacgcttacctccggcattaaaacaacttgaagttccactgaatattttccatcaatgtggtcagcaacaggttgaagcaactcaagctttatacgcagacgcaccagcaaatttgaccgtacaggttttgccgtttattgaagatatggcgaaagcttatagcgaagcagacctgattatttgccgtgctggtgctttaactgtgacagaagtagcaacagctggtgttgcagcagtttttgtaccgcttcctattgcggtggatgaccaccaaactgcaaatgccaaatttctggccgatgtcggtgctgcaaaaatttgccagcaatcgactatgacaccagaagttttaaatcaattgtttactacgctgatgaatcgccaattacttacagaaatggcagtgaaagcgcgtcaacatgcccaaccaaatgcaactcagcatgtggttgatcttatccaaaaaatgtaatcggatttactatgtctccaacaacagctgcgaaccaagcaaaaaaactgattaaagtgcctgaaatgcgccgtatcaaacacattcattttgtgggaattggcggtgcaggtatgtgtggtattgctgaggtgttagctaaccaaggatataaaatttccggttcagatattaaggcatcaaaaaccacacaacaattagaagaaaatggcattaaggtctatatcggacacgaagcagaaaatattaaaaatgcaaatgtgcttgtcgtgtcaacagcaattgacccggaaaatccggaagttaaagctgccattgaacaacgtgttccgattgtacgtcgtgcagaaatgctcggtgaacttatgcgttaccgtcatggtattgctgtggcaggtacacatggtaaaactacaaccacaagtcttttgacgacaatgttggcggaagaaaacctcgacccaacttacgtgatcggtggtttacttaacagtacaggtgtaaatgcagcgcttggtgaaagccgctttattgttgctgaagctgacgaatcggacgcatctttcctttatttacaaccaatggcagcgattgtaaccaatatcgatgctgaccatatggacacttatgaaggcagtttcgataaattaaaagataccttcgtacagttccttcataacttaccattctacggcttggctgtggtttgtggcgatgatgcgaacatccgtgagattttgccacgtgtaggccgtccggttattacttatggttttaatgaagataatgacatccgtgctatcgatgtagagcaagatggtatgcgttcgcactttactgtattacgtaaaggacgtgagccgttacgtctaaccattaatcaaccgggtttacataacgttttaaatgctttggctgcaattggtgttgcaactgatgaaggcgtttcggatgaagcaattagccgtgcattaaaaggttttagtggtgttggacgtcgcttccaagtacaaggtgaatttgagcttggtgaagggaatgtaaaattagtcgatgactatggacaccatcctaaagaagtagaagctacgattaaagctgctcgtcagagccatcctgatcgtcgtttagttatgcttttccaaccacaccgttactctcgtacacgtgattgttttgatgactttattgaagttttatctcaagtcgatcaattattattactagaagtttatccggctggggaaaaaccaattgttggcgcagatagccgtactttggcgcgtagtattcgcttgcgtggtcaggttgaaccgattttgattgatccggttgaaggtaatttgcaaaacatcatgcaaagtgtgttacaaccaaatgacttgttattaacgcaaggtgcaggtaacgtgggagcaatttcagtagaacttgcacagcaccatttgtatgtgaaataaacaaaaagtattgaattatcgggttaaggatttaaacgtgtcaaatgctacaaaattcggcaaagttgccgtgttacttggtgggaaatcggctgagcgtgctgtgtctttagatagtggtcaggcagttttggacgctttgttacgttcaggtgttcaggctgaggcatttgatccgcaagaccgtagcgtaactgaacttgtaaactatgaccgtgcatttattgtattgcatggtcgtggtggcgaagacggtcaaatccaaggtgtgcttgagtggttgaacatcccttatacaggaacgggtgtacaaggttctgccattggtatggataaagtcaaaaccaagcaaatctggcaaggaagtgatttaccaactgcaccgtatcgcattattactaaagaaactgacttggattcagtgattgctgaattagggttgcctgtcattatcaagcctgtacatgaaggttcaagtgtaggcatgagtaaagttgagaaagctgaagattttgcggcagcaattgaaaaggcaactcagcatgatgctgtagttatggcagaaaaatggattacaggacgcgaatttacgatttcattcttaaatggtcagcctttaccagttattcgtttgcagccaccagcagatgttgctttctatgactacgaagcaaaatatcaacgtaatgatgttgagtatggcattccttgtggtcttagcgaaactgaagagaaaaaactacaagctctatgtttacgcgctttccaggccgtaggtgcagaaggctggggacgtattgatgcaatgcaggatgagcaaggtaacttctggcttttagaagtaaatactgtgccaggcatgaccagtcattcgcttgtcccaaaggctgctaaagcagtaggttatagctttgatgaattgtgtgttgcaattcttgagcaaacattggaaggtacggcttaaatatggcacaacttccggcatccatgcgccgtaaacgtgcggcaattacttccattcatgaaaaaccgcctacgcgcaagcaaaaacttgccaatgccggcggatgggtgttgctggttattgcctttttagtcttggcggtcggaatttacggactatataaagttattactgatgcaactgttgcaaaacttgaagttgtaggttcaacaactccagttgagactcagcaagtgatgcgatatgtgcagccgattgtaaaagataactactttacatctgatttagagcagattcgtgataaagcattagaaatttcatgggtagaccgagtcgtcgtatctcgtgcttggcccaatggtattcgcgttcgtgttatgcctcgacatgctatcgcccgttggggaacaggtcgcttattgagcgatggtggcgatgtatttagtgaagcagagccgagacttcatcctgagcttccgttactacacggtccggtaagtcagtctaaaatgatgatgcgacgctataatgaaattaatcagttattccatcctgttaatttgcgtttaaaagagttatatctaacagagcgaatgacttggtttatgcagtttgactctggtttacgaattattgttgaccaagatcaaacaatgaataaattgcaacgtttaagtcatttggcacaatctgacctaaaacctgtgtggacaaaaatctcagccattgatttgcgatatcgtaatggattatctattcaatggaagaatgcaaccccacctaaaatcgtgaatggtcagtttgttgtaacgagtgatgacacaagcattgcaggtggtacaaaagcaaagccataatacgtggctttaaaataggcaatttgcctggtattagacaacaaagaaatggtatgagtgatgagtgaagctgttccctcagttgttgcgattgacattgggacgcataaagtttcagttttgattggaaaaattcatgcgccggataacattcaggttatcggtatggcaactgctcgcaatcgaggcatgaacaaaggaaaaattgtaagtctcgataaagtcattgctgcgattaaaaacgctgttgctgaagcggaaaatatggccgaatgtcgcattcatagtgcgtgggtatctattccaagtaccgagctacaaagtttctatgcttctggacgcacacctgttgctaacccggcacatgtgattacaaccaatgaagttgtacgtgcattagagttggcaaaagcaagccatgtgacttctgactattatctagcgagtgcagtcccattaggatttgaattaggcgactcatctgaatgggttcaaaacccaatcaatatgaccgctcacagcatgactggtcattatcagcttatgatgatgccgattgccactatgcaaaaccttgatcgtgccatgaaaggcgcgaacattggagttgagaaaatggtagtttcttgcttggctacggctgaggcaagtttgcttaaagatgaaaaagaatatggtgtctgtcttgtcgatattggtgcaggtattaccaatctggcagtttatttagatggccgtttggctttagcacgcaccttacagcgtggaggtgagcatgtgacacgtgatattgctgccgtgttacaaacaaccactgaagaagctgaacgtattaagattctgcatggctgtgttgatctaagtgctgttaagcctgaccatatgattcaagtacagggtattgatggtccgcaaacgattagccgaattgagttagcggaaattattattgctcgttatgaagagattttcagccagattcgcgaagaactcgaacaaagcggtgcaatccatggtctatatcatggtgttgtattgactggtgatgcttgccagattgaaggtatggtaagtttggcgcgtcgtatgttaggtgtgtctgcccatctaggtaatccgccattacaggtgtatgctgatgatcagcatcaagctgcattacgccgctcaatgtatgcaacagcagctggtttacttatgtttagccaaagtgaattacaagaagctgttgaggagcctgaagagggaaatgaccgttcggtatgggaacgaatggtgaatggctggaatgcttttaatagcaaacttaaagccattttttaggatgtatgtatttattggtagaattgttaggaagttgtaagagaaaaccactgtacttgacaaggttggtattgcacagcattcttaaaattagttatttttgaaaatcaaggcagtatacgggctgaagtgactgccataatgtattaggaaccctaaaggtcatggcctcatttgaatttatagaagatgaactaaacgatggcaacggtcaagcccgtttcactgtatttggtgtaggtggcggtggcggtaatgccgttcagcacatggtacagtctgatattcagggtgttaaattcgtttgtgctaatacagataaacaagcacttgactgtatgaatgcccctttcaaaattcagttaggtgagcaaagtacacgcggtctaggtgcaggtgctaaccctgaagtaggccaggtagcagcagaagaaagccgtgaaattattcgtcagcaccttgaagggactgacatggtgtttgtaaccgctggtatgggtggtggtacaggtactggtgcagctccggttgttgccgaagttgctaaagaaatggggattttgactgttggtgttgtaacaactccatttaactttgaaggccgtcgtcgtcaaaagtctgctgagcgtggtattgaagcgctggaagctcatgttgattcattgattattattcctaaccaacgtttattaagcgtttatggtgatatttcaatgaaagatgcctataaaaaggcagatgacgtattgttaaacgctgtacgcagtatttttgaccttgtagttaaccgtggtcatattaaccttgacttcgcggacttgaaaactgcaatgagtactcgtggttacgcaatgatgggtgctggtttgggccgtggtgaagaccgtgcgcgtcaagcagctgaacaagctatccgtagcccattgcttgataatgtaaacattattaatgcgaaaggcgtgttaattaacattactggtggcgatgacatcacattacgtgaaacagaaatcattactgacgttgttaaccagattgttgacctcgatgaaggtgaaatcttctacggtacagtatttgacccagatgcacgtgatgaattacgcgtaactgtgattgcaactggtttaacacgtaatgcagctgatgcagagccaagaaagcgtaatacagttagccatacatcaactcaatctgcacaatctgtagatgaagatgacgttcctgcaattaataaacgccaaaatgctgaaaatgacgtgaataatgcgccaagttcaacaccgcgttcttcgccaatgagtattcaagattacttgaaaaatcagcaacgtaagtaatttagcgtacaatctattgaaaggcagtgtataaacactgcctttttttatttttgatcaatgactaaatatgctaacgtatagcggttttaaaaaagaagttacaaagcatggtgaaacagcgtactctcaatcgtgtggtaaaagcgagtggaataggtcttcatagcggtcaaaaagtgatgatcaatttcattccacataccgtggatggaggtattgtatttcgccgtatcgatttggatccacctgtcgatattcctgctaatgcattgctgattcaagaagcatttatgtgttcaaatcttgttactggcgatattaaagtcgggacaatcgaacatgtgatgagtgcgattgcaggtttaggaatcgataacttaattgtggaagtgtctgcttctgaagttccaattatggatggtagtgctggtccatttatttatttgctcatgcaaggtggcctgcgtgaacaagatgctcctaagaaatttataaaaatattaaagccagttgaggctttaattgatgataaaaaagcaatattcagcccgcataatggctttcagcttaactttacgattgattttgatcatcctgcatttgccaaagagtatcagtctgcaaccatcgatttttctactgaaacgtttgtgtatgaggtcagtgaggcacgaacttttggttttatgaaagacttggattatctcaaagcaaataatttagctttaggagcaagtctagataatgcaattggcgtagatgatacgggtgtggtgaacgaagaaggtttacgatttgccgatgagtttgttcgtcacaaaattttagatgcagttggtgatttgtatttacttggtcatcaaattattgccaagtttgatggctataaatcaggacatgccttaaataatcaactattacgcaatgttcaaagcgatccgagtaattatgaaattgtaacatttgatgacgagaaagactgtccaattccatacgtgagtgtgacataagtcattgtctttatttggctatgttataatgtaacattagtaagtgtgatttttatcacatattaagaacgattctaattaagaaatagaaagctcatcattttttattgcttgccaaacgtagtaaagcttggctaagcttagggtcgctcacgaagtcggcggcactacgtaacatttcttgtgtttccggggggatggatttagaaggctcagatgaggtcgttacaggaatagttttatttcttaagcgaacttgaattctttgtaagtcttttaatccttcaagttgagataatttagatacatattggctctgtaaatagctgagttgactaatcattgcctgattttcaccagtaataattaaagagccattttgataacacacgacttgccattgttccggttggggcaataagggttggattattttcgtaagtctttgccattgcgcgacttgcgttgttagaaacgtaaggtttcctgtttttatgtgttttccggtttgttgaaaaacgttatcgggtttagacattgatcattctcaaatggtttcttgtcctaatcttaagcgttcatttcaaccgatatcaaggaagagatcataaggaacttgagtaagaacagtttcaagaggtttttatgcacacgcgtcgtattttattagcgttttcacttgccgcttcggcagcatcggttgcttttgcagattatcaaaatattaaccaatctactgattcagatcgattggaacagttatcaaaaacactatctcaaggctcatatactcatcctgatgatttagatcttccggcgagtgcaaaagtttcagtgactttacgtgagaaaacagttgaactcaacaatgattcactggcaaagaaatacggcactacgacagctaaaaactcatttaaaacctcttcttcaaatccttattcttggttagtttctcatcctcttcctgatacagtacgtgtttcttctaactttggtggtcgtaccatgggtggtcgtgcagagcatcacggtggtttagatatggctgcaccaagtggtacaccaatctatgcgactggcccgggtattgtgactaaatcaggctggggcacaggttatggccaatatgttgaaattaaccatggtaatggttatttaacacgttacgcacatgcttcacgcttaatggttcgagtaggtgatcaggtttctgctggtgaccatattgctaatgttggttgtacaggccgctgtactggtccacatttacattatgaagtagttaaagatggtcaacgtaagaatccatcaacttacttagcaatgttgccttaattacattgcctccaaggtcaaggttattaaatttatgaatttgaaattaacttaaaccttttttaacgtaatgattgtataaaaaaacgcctttattggcgtttttttgttattttgtttactgctcggtcaatgactattcattcagaaaataataggccccccccacattcacccgtggcaataacttgaaaggggtaaaacgtggtaaaaatacaaagtagattagagaacaaggaacaggtgaattatggcgttttacggtgactccgacgcacaagaaacccaagaatggcaagatgcattcgattcagttttacaacacatgggaactgagcgagcggcattcttgttggaaaaactttaccaacaagcaattgctaagcatgttccaattcaacgtctcaatacaccttacttaaatacaatttctgttgaagagcaacctgcaatgccaggcgaccaagatatggaacgccgtattcgtgcattgattcgttggaatgccttagcaatggtacttcgcgcgaataaaacaggtgatgatttaggtggtcacttggcgagcttcgcatcaagtgcaacattatatgacgtaggttttaaccatttcttccgcgctaacagtgataactttggcggagatatgatttattaccaaggacactgtgctcctggtatttatgcacgttcattccttgaaggacgtttaactgaagaacagttaagtaatttccgccgtgaagttggcggtaacggtttaccaagctatccacatccatatttaatgccagactattggcaattcccaactgtatcaatgggtcttggtccaatcatgtcgatttatcaagcgcacattcaaaaatatttgatgaaccgtggcttgatcaaagaagaagatcgtaaagtttgggcatatctcggcgatggtgagatggatgagccagaaagcttaggcgcgatctcacttgctggtcgtgagaagcttgataacttaatttgggtagttaactgtaacttacagcgtctagatggtcctgtacgtggtaacggtaaaattattcaagaacttgaatcaatcttccgtggcgcaggctggcgtgtcattaaagtagtatgggggcgtcattgggatccattattagctaaagacacaagtggcgcattaaaagcacgtatggaagaagctgttgatggcgactatcagcgctatcaggtaaaaggcggcgcatatacacgcgaaaaattctttggtaagtaccctgaagctgcggaacttgtaaaagatttaagcgatgaagatatcgataatcttaaccgtggtggtcatgacccttacaaagtttttgctgcatatgcagaagcgatgaaagcaaaaggtcaaccaacagtaatcttggcgaaaactattaaaggttacggtttatctgaagaaattgaagcggtgaataaaactcaccaaatcaaaaagatgcaaatcgactctttaagatatgtacgtgaccgtttcaatcttccattcacagatgagcaattagaagagcttccattctatcgcccaagtgaaaactctccagaaatgaaatatatgaaagcgcgtcgtgaagcgttaggtggttacttacctgcacgtcgtcgtgagagtgaatctttagcgattcctgatttatctgtatttgatgcagtgttgaaaggttcgggtggcaaagagcaatcaaccactatggtgatggttcgtttaattgctgctttacttaaagaaaaagcaattaaagaccgcgtagtgccaatcgttccagatgaagcacgtacttttggtttagagggtatgttccgtcagcttggtatttatgccgctcacggtcaaaaatatacaccggaagaccaagagcagttaatgcattaccgtgaagcaaaagacggtcacatgttacaagaagggattaacgaagcaggtgcgatgagtgcatgggctgcgttagcgacaagttattcaaccaataacttgccaatgattccaatgtacatgtactactcaatgtttggtttccaacgtattggtgatattgcatgggctgcgggtgatgcacaagctcaaggtttcttgttaggtgcgactgcgggtcgtacaacattgaacggtgaaggcttacagcaccaagacggtcattctcacatcttggcgaacacgattccaaactgcgtatcttatgacccatgttttggttatgagttggctgtcatcgtacatgacggtttacaacgtatgtatgtgaatcaagagcgtgtgttctattacttaactgtaatgaatgaaaactacgagcatcctgcaatgccagaaggcgttgaagaaggtattaaacgtggtatgtatttattcgagaaagatgaaaaagcaactgttcagttacttggttcaggtgtaatccttcgcgaagtgattaaagctgcgaaaatcttacgtgatgaataccaaatccattcaaacgtttggagtgtaacaagcttcaatgaattggcacgtgatggtatggcatgtgaagaatacaaccgcctacacccacttgctgaagaagttaaagaatcttgggtatctaaacaattacgtggtacggaaggtatcgtagtttctgctaccgaccatatgcgtgcttacagtgaacaaatccgtgcgtatcttccagatggtcgcccatttgttgcattgggtacagatggttatggccgttcagatacacgtgcgaacttacgtagtttctttggtgttgatgctgcgcacatcgttgttgctaccttgaaaaaattagctgacgaaggtgaagtagacgcacgtttagtgaaagatgcaatttctaactttgagctagatactgaccgtccggttgcatgggcgccgcaagcacatccggaagttcagccagttgctgaatacaatgaaacgcaaacaggtgaggggaactaagcatgcaaattaagacccctgatattggtgtagataaagcaaacgtcgctgaaattttagtaaaagttggcgaccgtgttgaagttgacgacagtatcgttgtgcttgagtctgataaagcaactgttgaagtgcctagcacttcagcaggtgtcgtaaaaagtatcttgattaatcaaggtgatgatgtgactgaaggtgttgctttgattgagatcgaagcagaaggtgcggcacaagcagcaccggaaccaacaccagctcctgcggctgaaaagccagctgctccagcacctgcgcaacaaactcaagcttcagctcaacctgctgctacatcaagtgcaactgttgaagtgactgtacctgacatcggtgttgaaaaagcattggttggtgaaatcctcgttaaagtgggtgaccagatcgatgttgaacaaagtattgtggttgtagagtcagataaagcgactgtagaagttccaagtagtgttgctggtactgtagaaagtattcaagtgaaagaaggcgataccgttaaagaaggtgttgttcttattcaagtgaaaacagcagctgcatctaatgcgcaagcagaagctcctgctactacaccagctccagctgcggtagcagaaccggttgctgcaaagcaagaaactgtggcagcggctccagctcagtctggttcagttgatatcaatgttcctgatttgggtgtagataaagctgttgttgctgaaatcttggttcaagttggtgataaagttgatgtagaccaaagccttgttgttgttgagtcagataaagcaactgtagaagttccaagtaccgttgctggtgttgtaaaagcaattcacttgcaagcaggccaacaagtttcacaaggtgtattgcttgcaacaattgaagctgaaggccaagcacctgctgctgcaccagcggcaaaagcagaagcagccccagctccacaggcagcagcacctaaagcagccgctcctattgcaactcagtctgcacctgcggcgcctacatctggtactgataagttaacgaaagagcaagaagcagaaaacgctaaagtgtatgctggtcctgctgttcgtaagctggctcgtgaacttggtgtgatcttgtcacaagttaaaacttctggtgagcatggccgtgttgttaaagaagatatctttgcttatgtgaagagccgtttaactgcgccgcaagctgcaccagtagctcaagctactgctgctccggctggattgccgtcattacctgactttactgcttttggtggcggtgaagtaaaaccaatgacacgtttacagcaagtttctgtaccgcagttgtctttaaacaactacattccacaagtaactcagtttgaccttgcggatattactgagctagaagcttggcgtggtgagctgaaagacggctttaagaaacaaggtgtgagcctaacaattttggcatttattgcaaaagcagtagcacacttgttgaaagaagagccttattttgcgggtcacttagcagatgatcagaaatctgtattgctccgtaatgaaatccatatgggtattgcggttgcaactccagatggtttgaccgtgcctgtactacgtaatcctgaccaaaaatcaattaagcaaattgctgttgaattaggtgatttgagtaaaaaagcgcgtgataagaaattaacgccgaaagatttacaaggtgctaacttcacgatcacaagcttgggctcaattggcggtacagcatttacgccactagttaactggccacaagttgcaattttgggtatttcacctgcaacgatgcagcctgtatggaatggtaaagactttgatccacgcttaatgttgccgttgtcattgtcttatgaccaccgtgtaattaatggtgcggatgcagcgcgctttacaaataaacttacgaaacttcttaaagatattcgtactttattaatctaatgctttgaaagaacatactaaaacctcgcttcggcggggttttgttttaatgtctatttgacttaattttaggttaatctacagattaaacaggacttatcgagagtgaggagacatttctcgttattacataaaggagaaatagtaaatgttgggttttctgaaaattatgttgcccttgttgttggttgtatttttattgatgggaatatgggtcagtattttgcacttcccttgggagtggatgacttatgttgtcatggggattgaagtgtttgtcgctactctgattttaccccttgaatatcaaactggaacaagtagcagccatattggttttatcagtataagtgcttgtcttgcagtgctgttaggaatagcccgtttattcgtatggacatgggtaaaattttttgcctgaatatttgaaaaatagatttagtcgaatataataagcccatacttcattggggagtagccgctattcacagcaaatgtgaataggtgatggtcaacataattgttcaacagaacatggtcatcatagcttaaacgtctcatcgttcctgagttggcaagacctttgatttaccactctgcaatcattttatgatatttggctagcaggaggggtaggtcataggcatttatgctagccagagaaccgacatgcaagaatttctgatttctacctcgattgttgccctcgctgaaatgggcgataaaactcaattgttggcacttttattatctgcacgttttcgtaagccaatccctattttaatcgcgattcttttagcaactttaattaaccatggtatttctgctgtgcttgggcagtggattacaacggttttaagccctgcaatcttagtctgggtacttgcggttggtttcattggtatggcgttctggatgcttattccagatgagcttgatgatgaaacggcgagtattaataaatggcaaaagtttggcgtttttggcgcaacttttattttgtttttcttggcagaaattggtgataagacccaaattgcaacagtcgctttagctgcacgttatgacagcattttctgggtaatgttaggcacaactttaggaatgatgattgccaatgcacctgctgtatttattggcaataagttggctgaacgtttgtctattgcgctcattcataaaattggcgcagctattttcttcattgtaggtgtttctacgctcgtacagcattacttcttttaaatgattttaagcttatataaaaacgcactcattaagagtgcgtttttttataggtaattttaatagttaaatttcacagtaaagttaatttgacgtggattacctaaagtcaccaaattttcgttgagagcacctgcatagtaatctttatcaaatagattacggatcgcaagttgggcaccccaacgctcagcatcataacccgcttcggtatcgaatactgtatagcctggaacatgcacatctaaaccatcaacggttttataagtttcacctcggaaaccaccacctacataccaaccaagttttgatgatggatcaaatttgtaacgagctgacaagctataagcgtgttcaggaatattgtcgagcgctttccctacattgcttgcatttgcatctttactaatttctgcatcaattgtgtaggtatatgcagccgttaattttaaaccttctaaaatttctgcactaagttcagtttcaataccgcgagttaactgttcaccacgttgtactttatagccactattcgcagtatcagtaaccaaaacattctgacgttttagatcataccaagcgatagcaccttgaattcgttgatcgggactttgtaatttcatcccgacctcaacctgttttcctttttctggcttaaatgggttgctatttacgtcagtaccactatttggagtaaatgatgtagcgtagctcacataaggtgccacaatatcattgagggtatacatgacagaagcactgcccgtaaatgcattatctgattgtttactcgcattgccagttactaaacttgtagtttgggtttgtgcccaatcttgacgtcctgataagcttaaaagtaattgatcattaagctgaatacggtcgcgtaaatagagccctagatatttgagacgattgatatcacgtacattttgcttcaatgtcacgttctgaccatagatagggttatagatatttaaatcaccaatatcatatttatcattggtgtaatcacttttttcctgaaaagcatcgactccaatattaatgtcgtgctgcatgccatatagatcaaactgtttatttaaacggttatcaatggcgaagcttaagttatcaataacttggtgtcggctgttatttctacggctgatagtcgtataatcaatttcaccttgtttatcttttgcccaaaagttactacctgtacgagcaaagactgctttgccatccattttggttttttgtacggcaaaattctggttaaagttccagccattatcaaaagtatgtttaaacgtataaccagtgcgataaacatctgcctcatatttaccgaaattaggatcgccaatatctctgtaacgacaaatttcacagaacccttatcctatcagggttctgccttcttaaaattgccaaaatttccttaaactcttcttttttcccaaaaccaattaaacgctgaatcgccatttgaacatagtctaaaccatagcgaaataaactcattgagagtcgtccatgcttctttatttttatcgcttttttttgatcatgttgccattcacccgttaagtaacaccaacagaagcttatagctaacaccgcaatcaattttttcactcgtctagggtctgtcaagcgcgtattttcaagattaaacccgcgtcctttgagacaactgaataaggtttcaatttcccagcgtaatgcataatcctgaatagcattggcattaaactgaggagaaacgacgagtaaaagctctccattttctaactgtagtgcacttatatatagtttcacccgaccaaccaaaatccgtcgtttacgacattcaatttgaccaactttaagatggcgaaataaatcactaattttatgattctttcctaaatgattggtgacaatgaagtttttttaacacgaatgcagaagttgatgtcttgttcaattaaccatgtaaaccactgctcaccgataaactctctgtctgcgaacacattcacaatacggtctttaccaaaaatggctataaagcgttgaatcaaagcaatacgctctttcgtatctgaatttccacgtttattaagcaatgtccaaaggataggtatcgctattccacgataaacgattgcgagcatcaggatattaatatttcgttttccccatttccaattggttctatctaaagtcagttgcacttggtcgaatgaaaacatattgaaaatcaactgagaaatttgacgataatcaaaatactgacctgcaaagaagcgctgcatacgtcgataaaatgattgtggtaagcacttgatgggcaaggctttagatgcagaagaaagattacatgtttgctttaaaataatcacaagcatgatgagcgcaaagcactttaaatgtgacttgttccattttagatatttgtttaagataagatataactcattgagatgtgtcatagtattcgtcgttagaaaacaattattatgacattatttcaatgagttatctatttttatcgtgtacagagcgccaatatataaactacgatctataggtccattagggttgtcttttaatgtaccaattacaggtaaaccttgctgacgaatatattcacggtgttgatagcttgcgattacagagaggtcagtgttatcaccgaggtcaaaattataagaaggcgagatataaaaatttttaaaataaacataatcggtcggatcatcttgatcagagatacgtccatttaaacggaaagcacctttttcactattgtttgggctgtagtttaaatcgaatgttccttctttaaggctgtaactaccataagtcatgctagcacgtgcaaagctttctgcttctggtcttttagtcactaaattgaccataccacccggagcaactaaaccgaaattaatagaagcaggaccttttaaaatttgtacctgatccataccagatagttcggtggcaacataagtattttggcctacccttaaaccatcgacatacaccgagtcagaagaagtttgcccacggataatgaaatcatcccaaccgcggcgaccaagtttcccagcttctacgcctgcaacaccttcaagtgcatctgctaaagttcttgcttgtttttggtcaagttgttcgcgagtgacgacagaaactgattgagcagttttaaatagaggtgcatctgattttaaagctgaatttgcttttgttgcgacataagaagtggggttttctttttgtgcttgaatagaaatagtgggtaacacattggttgaattttgctgttctgccgtttcttcagcatgacttgttgtcattgaagtaaaaatagcaactgctaacaaagtttttgaagttgaaaaagcaaagcgttgagtcatgggaggcctaaacagcacaaaaagtaaatttgataatgagaattattttaatttattgcagtttaattttaaataacattatgattcatttataaaataagaaaagcaaaatcaattttaaaatattatgagaaaaatagagtaattcattgcatgagttattgaatcccattattttattatggaaataaaaatatctaatatttaaagtttttttggggaattttatggggtttgaaaaaacaacatcacagatattatttgataatggcgtacacaaatgtattagttttaccagtttggtcaaaggggaaggcatacaagccaatcaatttttaattattgatcatgagcgtgctgccgtgatcgacccggggggtgatttgacctatgttccgctgacaatggaacttaataaatatacacgccttaaaaatcttgattatgtgatggcttcgcatcaggatccagacattataacctcaatgccccgctggttggtttataccgatgctaaagtggtggcctcaaaattatgggcacgttttttacctcacttaaattcatcatttatgagtgagcgtatgaaagggaattgggaagaccgtctgattgagctgcctgatcgtggtcaagtgattcaattaggtgaatcgaaacttgtaatcgttccagcgcattttctacattcggtgggtaattttcagttttatgatcccgttgctaaaattttattttcgggcgatatgggagcatctattgtagatgatgcaagtcagcctctaaaagattttgatagccatgtgatgaaaatgaaagcttttcatcaacgttatatgtgttcaaataaagtcattcgcttatgggtcaacatggtccgtcagatggatattgaaatgattttccctcagcacggtagtccatttattggtaaagagatgattaatcagtttttagactggattgaaacattgccatgcggtgtagatttaatgacagaacaaatttttagctgtccaacataaaaaataatgttcgacatattgagcccaatttgaaatttttttaggatttcgcgtcgcagaaaaatttttgatgacgagaatttgaataaaaatgttatctcaagttgcgactccagatgaatgcctacgctgtggggcatgttgtgcacattttcgggtttcattttactgggctgaagccgagttaatggaagaacatctagttgaacctttgacacctgtctattcatgtatgcgtggaaccaatcagcctgagccccgatgtcaggctttgacgggtgaaattggtaaagaggtgggttgttccatctatgcggtgcgtagttctacctgtagagaagtgcagattgctgatgagcagtgtaataaagctcgtttagcgcaccagcttattcctcttattcaagttagcccggcagattcagagaatgatcacgactatgatcaggtgagttaaatataagctaacacaataataagtgggaaatatttagagtaggcgaatatctattgctgaaaaaggcaaagataatatgaaaattgcatcgaaatttgtttataatagctcacggaatttaccagtgagattgttatgctgaccatcgttcaagaagcgctaaccttcgatgatgtcttattacttcctgcctactctactgttctcccaaaagatgtctctctaaagacacgtttaactcgcggcatttatttaaatatcccattagtttcagctgcaatggatacagtgactgagtcacgtatggcgattgcaatggcgcaaaatggtggtatcgggattttgcacaaaaacatggatattgctgctcaagctgcagaagtacgccgtgtgaaaaaattcgaagcgggtatggtgaaagaccctatcactgtaagccctgaaactacagtacgtgaactgattgcaattacctctgctaataacattagtggtgtacctgttgttaaagacggcaaggttgttggtattgtgacaggccgtgatacgcgttttgaaaccaatttagaacaacctgttagcaacatcatgacaggccaagatcgtttagtcactgtacgtgaaggcgagtctaaagaaaatattcaagcattattgcaaaaacaccgtattgaaaaagtcttggtcgttggcgagagcaacgaacttaaaggcttaattacagtgactgacttccgcaaagctgagagttatccaaacagttgtaaagatgatcttggtcgtttacgtgttggtgctgcggtaggtacaggtgctgatacaccaagtcgtgtggaagcattggttgaagctggtgttgacgtcattgttgttgatacagcacatggccactctgctggtgtaattgaacgtgtacgttgggtgaaacaaaacttccctcaagtacaagtgattggtggcaacattgcaactggtgatgctgcattagcattattagatgcaggtgcagatgctgtaaaagtgggtattggtcctggttctatctgtacaacacgtattgtggctggtatcggtatgccacaaatttctgcaattgacagcgttgctagtgcactaaaagatcaaattcctttaattgcagatggcggtatccgcttctctggcgatatggcaaaagcgatcggtgcgggtgcaagtacgatcatggttggttcattacttgcaggtactgaagaagcgccgggcgaagttgagtttttccaaggtcgttactacaaagcatatcgtggtatgggttcattaggtgcaatggcgggagcaactggttctgctgaccgttatttccaagattcaaaagcgggtgctgagaagttagtaccagaaggaatcgaaggccgcgttccatataaaggcccaatgggtaacatcgttcatcaaatgatgggtggtttacgttcatcgatgggttatacaggttcagctgtgattgaagatcttcgccaaaatgcgaaatttgtgaaaattacttcagcaggcatgtcagagtcacatgttcatgatgtaacgattactaaagaagctccgaactatcgtgttggttagattttggtaaccaaaacaatcaagaaagccgtcagtacactgacggctttttgtttttggtgtaaagtaaatccgatgaaaagagatatggcggaatagccatatatgaaatgagccacggctgaagtggcgtaaaaatgagataagctatgagttattttggaacggatggtattcgtggaaaatttgggcaaatgccgattacgccagagtttgctttaaaactcggttttgctgcagggaaggtattaaaacgaacgagtccgaaaaataagccacttgttgtattaggaaaagatactcgtttatccggttatattttagagtctgctttgcaggcgggattaaatgctgctggtgtatatgttcacttacttggaccattaccgacaccggctattgcacatcttacccgtgccttacatgcacatgcagggattgttatttctgcatcacataacccatattttgataacgggattaagttcttctcaagtgaaggtaaaaaattaccagattcattgcaggaagaaattaataaagaattagaaaaagatttatttatcgaagacactgcaaacttaggtaaaagtgttcgtgtgaccgatgcaaatggtcgttatatcgaattttgtaaatctacattcccatatcattttgatttaaataatttaaaaattgttgtggattgtgcgcatggcgctgcttacagcgttggcccttcagttttccgtgaactcggcgctaaagttgtcgctttatacaatgagccagatggtttaaatattaatgaaaactgtggttcaactcatccagagagcttacaaaaagcggttgtggaacatggggctgacttaggtattgcctttgatggtgatgctgaccgtgtagtgatggttgataagttcggtaacttaattgacggtgaccacatcttatatattttagcgactcaggcaaaaaacaagccagcaggtgttgttggtacagtaatgagtaacatggcacttgaagttgcgcttgaaaaagcaaatgttggctttgttcgtgcaaaagtcggtgaccgttatgtattacaagccctagaagaaaacggatgggtaacaggtggtgagccttctggtcatattctgactttagacaagagcacaaccggtgatgcgattattgcagcattacaagtgttaaccgtgatggttgagcagaacaaagcgctgcacgaattggttaacggctttaaactgtacccacaagttcttgtaaatgtacgtttggaacaaatgcttgatccatattctattcctgcattagttgctgagttcaataaagctgaagagcagctcaaaggacgtggacgtattttaattcgtaagtctggaactgagccagtcattcgtgtcatggttgaaggtgataacgagcaagaagtgaaaactttagctgaacatttagcaaatgcagttcgttcacaggcacaagtcgcataaggtgtatggcatgagtgatgtcattaaagacttaagtgaattgcgcttaagctatgaacaaggtgagttgtacgagactcaagttgctagcaatccccacgagcaatttctaggttggcttaatcatgctttagcagctaacttgcatgaaccgtatgcaatgtcattagcaactgcgagtgctagtggtcgtccgcatgtcagaactgtgttgttacgcggtgcgacagaagcaggttatgatttctataccaactatgacagtcaaaaaggtatagatttggcagaaaatccatatgctgaattgttattttattggccaagtctagagcgtcaggtacgagtaggtgggcatgttgtaaaaattcctgaacaggaatctacagactactatcataaacgtccacgtgatagccagattgcagctcatatcagtactcctcaaagtggcaaaattgaaagtcgcgaattgttacaacagcgttttcaagacttgcaacaacaagttcaaagccacgaagtactcgataagccggaattctggggtggataccgtctacagccggattattatgaattctggcaagggcgaccaaatcgtttacatgaccgcttgagttatgaaaaaatcgacggtcaatggacgttgcaccgactgatgccttaaatgacaaaaatacaaattaaacaaagacctttattgacacgccctgaacagtttcagggcgtgcctccgtttattgccgaaattttggcaagacggggcgtacaatccgagcaagaactagagttaaagcttaagaatttattggctcctgaactcaaagggttggacgctgctgtagcattaatggatcaagccatcgatgagcagaaaaaaatagttattgtgggggactatgacgctgatggcgcaaccagcactgctttaatgatgctcgtgcttcgcgatatgggagcacaagtcgactatttggtaccggatcgttttaaatatggctatggacttactcctgccattgctgagcttgctcatcacacctatcaacccgatctattaattacggtagataatggtatttctagtcatgctggtgttgatgcagcacatgccctaggcatgcaagtgattattactgatcatcacttaacgactaaagaaaccccacttgctgaggcggtggtaaacccaaaccaattaggatgtgagtttccaagtaaggcacttgccggtgttggcgttgctttttatgtacttgccaatttggcgagtctacgcaatagacagggtaaaagcacaagtaaagtgactcaatatttagatttagtcgctttgggaacttatgccgatgttgctgttttggattataacaaccgtattttggttgatgccggtgtaaaacgtattcagcaacatcagtgtcgagtgggaatcttagccttactcgatatcgctggtcgggaagctacttcaatacgtgctcaagatttaggttttgtgctcggaccgcgcattaatgctgctggacgtatggagagtatgcgtattgggatcgagtgtttattagctgacacgatggaaactgcataccccattgcccagcaattaaatcagttaaatatcgatcgccgtcaaattgaaggggagatgaagcaacaagctttatctgctttagacagtttacaactctcacaacaagatattcccgcggcgcttgttttgtttgaagaaaactggcaccaaggtgtcatcgggattgtcgcgggacgtttaaaagaacagtttcatcgcccaacgattgtgtttgctccagatgaagatggtattcatattaaaggctcagcacgttccattgatggggtgcatattcgagataccattgaacaagttgccgaacaacatcctgagctggtgagtcattttggtggacatgcggcagcggcaggcttaacgattcgtaaagaaaactttgaagcttttaaaaccgtatttaatgattgtgtagctgctatggatgaatcaatctttcaagcgacattatggaccgatggtgagctacctgtctctgctttgcaattagataccttaaactggattgagcgattaggtccgtggggacaaaaatttccactgcctcaatttgaaggatattttaaagttatcgattttcgttggctcaaagagacacatttaaagcttagattagcgatagaccaatatagtttcgatgctattgcttttaatgcagcaggtcgcttcgagtttgatccgatgcgagaccatgtgcatttggtttatgaaatagaccgtaatgtctttaatggtaatgtgagcttacagctacgcattgtgcatttaaatcaataaaaaaatccgctcaattgagcggattttttttaatctaggttagattagaagcggtatgctgcacgaacaccataagtgttgtcgttatcaccgaatccaacacgaccttcaacacttacttgctgatttaagaattttttagcattgataccaaattcatctttatcagttaagtcgttattgtagtagtccacacctaaacttaaagttttatcgatgtagtagtcaccacgaactttatattcgtcaaggtcaccaaacgcaccataagcttcaaggtttacgtcatgttgaccaacttgggttacatacttagcacgaacggtaggatctgcaccgtctttaccgtctttctcgtcgtaacctttaacacctagagcaagtaataaaccaggagctggtaaataacctacttctgcagcataagtagtcactttactgtcgatattagtgttgtcgatttcacgttcgtttctgcctacatcaccgctaaggtaaaagtcagagttaggaacgaagtactcaacgcctacgccatattgagtgtcttttgtgccgctgttatcgccatagttaacatgtgcgttaacgttacttgcacggtttaagaatgctgcttctgcaagcggtgcattacgtgtttgaacagggttgaaataataagtcccatcaacaccgaatttgcttacgctgctgccgttatctggatcaagataattgtaagaaccaccaacttcagcttggtaagcgtttgctgcgccacttactgcaagagcagataaaagagctgatgcaattgctagttttttcatggaatctctcccctctaaaaacgattttataaatgttttgttacaacttttagtctagagcaaaatcatttaccgtcaatcttgtccaagtaactggactgtaaccatgtgctttttatgtaactatatttaatttaatatattgattttaaataataaaaaaacaatgttttattttattaaaaatgaggagattttgtgtagaaacttaaaaatgctggaaaagtacccaattttgtatggggatgttacgagttaagcttaaaatctactgaaagaaaattagcaaacttattcattgaaataagagttagcgattaaagcaggttcgaagataaccgtagctatgataaaatattcaactgtttatctgcttttatgggaacactcgcgtggaaattaatccttatctaaaccaattgaaagacttaactgatcgtagccaaacactacgggggtatctttgactacgatctaaaaaaagaacgtttagaagaagttttacgtgagttagaagaccctgcgatctggaatgatcaaaaccgtgctcaggcaatggcgaaagaaaagggcgaactagaaaacgttattaatgtattagatggcttatctacacagcttgaagatgcaaaagcaatgttggatttggctgtagaagctgatgatgaaagcttgcttgaagatgttcagtctgaactgagtactgctgaagaagaattagcaaaacttgaattccgccgtatgtttagcaatccaatggacccgaatccttgctatgtcgagattcaggcgggttcaggtggtacagaagcacaagattgggcttcaatgctattgcgtatgtatatgcgctggattgaacgtcatggttttaaagcagaacttatggaagtctctgacggtgacgtcgcaggtattaaatctgcaacgattcgtgttgaaggtgaatatgcgtatggttggttacgtacagaatctggtgtacaccgtttagtacgtaaatcaccatttgacagtggtaaccgtcgtcatacttctttctctgcggtatttatttctccagaagttgatgacaatatcgaaattgatattaatccttcagatgttcgtactgatacttaccgtgcatctggtgcaggtggtcagcacattaacaaaaccgattcggcagtacgtttgacgcatattccgactggtattgtagtggcatgtcagaaccaacgttcacagcatgcgaaccgtgatcatgcatggaaacagttacgtgcaaaattgtatgaattagaaatgcaaaaacgtaatgaagctgctcaagcacttgaagactcgaagtctgatattggttggggtagccaaattcgttcttatgtacttgatgactctcgaatcaaggatttacgtacgggtgttgaaaattcaaatactggtgcggttcttgatggtgaccttgatcgttttattgaagcgagtttaaaacaggggttataagagtcttttgaacttttaattctctataactcttaaatttttagcgattaaaacggcaaagcagttcagtgtttggaagttaatcggaaaaatacgatatgaatatcgaaaaaaatagatatgaatatcgtcaaaatacgatattatgtttccgaaatgctgaacaaagctttgttcgtttacaagacgtgttgagcctatggatattgatgcaattagcaaagccctagccaatcctctgcgtcggcagattctgcaatggttaaaagagccggagcattatttaccggtagaagagtgtggtggtagttttgaaaaaggggtttgcgcaggtcatattgaacgtttgggtaaagtagctcagtctacgatgtccaatcatttgtctgtattacagcaggcgggtctcattcaggtccaaaaatatggacaatggtcttatttttcacgtaacgaagctttgattcagcaatatatcgaacatttaaaacaaacactttaaaacaaataaagtgtaagtcgaggcgatcatggctgaactcaatactcccttaatagttggtgattttgaaattaaaaatcgactggtaatggccccattaacacgtgcgcgtagtggcgaaagccgtgttccaaacgatttaatggtgcaatattatcagcaacgtgcaaatgctggtctcattctcactgaagcaacagtgattggttcaaaaaccgtaggttatgcagatactccgggactatggtcacaagagcaagcacaagcatggaataagattattgaagcagttcatgctcaaggttcaaaaattgtagttcaactgtggcatgtgggtcgtatttcacatccagagcttttagatggcgatattcctgttgcaccgagtgcgattcaacctgcgggtgaagtaagtttattacgccctaaacgtccatatgtaacgccacgtgcgctttcaattgaagaaattcaggaaattgttgctcaatataagcattcagctgaattggctaaagcagcaggttttgatggcgttgagctacatgcagcaaatggttatttaattgaccagttccttcaaagtaatactaaccagcgtgatgatgagtatggtggtccggttgaaaaccgcgctcgcttgttattagaagtagttgatgcctttattgaagtgtggggcgctggccgagtaggtgtgcatattgcaccgcgtggcgactcgcatgatatgggtgatgaaaacccgctagcgacatttggttatgtggttgaacaactcagccaacgtaatgtggctttcattttctctcgtgaatatgaagcagctgatagtattagcccacaattacgtaaaaaatttaatggtgtatggattgccaatgaaaatctgacaccagagtcagcaaaacgtatcttgcgtgaaggtcaggcagatgctgtatcttttggtaaagcatatatcgctaacccagatctattacagcgtttagaacaaggcttaccattaaatgaacttcaaccaacgactttatatgctaaaggcgctgaaggatatacagactatccggctttagaagcttcataagttcataatattatttaaatttactatgtgctgaacttactcttttgtgagttcagtaaatggcttttcttgtatatggtagagtttaggtatcgaaactctgccattttttttatctatgttatattttccgcagtttttgaattttgactatttgaggcaaaccgcttggcgaccccattttggtacaacaccgcactccatttattaaaaccgttttatcgttggcggataaaaagacgtgcagaaagtctagaattatatcagcaggaatgtctggaaagatttgggccgtttgaagcaccgaagaatgtaaaagcgatctggtttcatgctgtttcagtcggggaaaccaatgctgcacagcccttaattgaatattacctaaaacttgggcagccagtcttagtgaccaataccacgaaaacaggtcaggctcgtgccaagtcactttttctaaaagaaccatatttagatttatttcaggccgtttatttgcctgtagaccagaagcctcttttaaaaaaattttttgagttatatcagccaaagcttttagcactggttgaaactgaactttggccaaatttaatcgatcaagccaagttacagcatgtaccttgtttgctgcttaatgctcggttgtcagaaaaatctgcaaaggggtatggcaaagtctcgggtttaacggcaggtatgttaaaacagctggactgggtgttagcgcaagatagtgcaactcgtcagcgttatgttgagcttggtttagacgaacacaaaagtcaggtcgttggtaatattaagtttgatatccatgcaccagaggcttttgttaaacaagctgcccaattgcatcagcagtggtatctggaaaaccggcaggttgtgacgattgccagtacacatgcacccgaagaacaacaaattttggaagcactcgcaccttatttaaattcagatcgtgagttggtgtgtattgtggtgcctcgtcatcctgagcggttcgatgaagtattcgaaatttgccaaaatttaaatttaattacacatcgtagaagtatgggccaaagtattcatgccagcacgcaagtttatctcgctgacagtatgggtgagctctggttatggtatgccttaagtcaggtgtgttttgtaggtggttctttaaatgagccgggtggtgggcataatattttagaacctatggttttaaatgtacctactgtggttggaccgcgttattttaactttcaaacgattgtcgatgagttcattgatgaaaatgctgtgcttatcgctcaagatgcacagcaggtcgttgatatctggttagcatgtctggcagaacctgaggcgactgaacagttggtggtacaggcgcataaagtgttgcaacgtaatcaaggttccttacaaaaacatatcggggtgattaatcgctatctggccgaaaaatcatgaatattgttttactagagcctgaagatgttcaatcggatacatggtctatccattcaaaacgtcaattacagcatttgcgtgaacatcttgatattacagtcggccagaatctaaaagttggtattcgtaacggcgcccgttatatcactgaaattgtttcgatgaatgagcatgaagtccgtatacggcctatttgtgaagaactactaccagcaaaacttccggttcatttaattgtagctttaccaagacctaaagttttacgccgtctaattatggacagtgtgactttaggtgttgaaaggataagcctgattcatagttatcgtgttgataaaagctattggcaaactccttttttacagcaaatagacaactacgttacgctgggacttgagcaagcaggcgatacaattgttcctgaaattcaactctataaacgctttaaaccttttgttgaagacgtcttgccaagtttaattacgcaggaaacacctgcctatgtggctcatccttatgctgagcaacgtatgccaattaatattagccatgcttgtagtgtagtggtcggaccggaagggggatttattccttacgaagtagatttgctcataaaaaacggctgccaagctatgagcttaggcaaccgtattttaagaaccgaaacgtctatttcttatattttaggtcgtttgtttagctgatgtttcagggtttaaagctggtggattagataccatttttaattcctgaattgggtaaggaatatcaatatcattttcattgaaagcttgttttacttgagcttgaatattactaatagatgaagagatatcagtttcagtggtatcaacccaccagcgtacagtcaggttaaccgagaaatctgctaaagctgtgacgttaactgaaaacgcaggttgactcagtacatttcggtcattattgagaatatctaaaataatctgttttgctttttgctcatcatcgtcatagccaattccgactacgaactcacagcgtcgttgttgataagcagtattaacagttaaggcacttgtataaaccgttgcatttggaataacaatacggcgaccatccggtgagcgtaggaaggttgcacggatctggatgtcttctacagttccttcaagtgaattcaccacaattgaatcgccaatacggaatggctcgctcaataaaatcaaaatacctgaaagcaggttttggaatatatctttaaatgcaaaaccaatggcgaccgaaccgatacctagcgcactcatgagctggcctggtgtgaaccctggaatcataatgacaagggctattaagaaaccaaagaataagatcgctgtactaccgacacggtttaaaactaaaacaagattttgacgagtataagagcgattttctaaagtcttacgaacaaagaacttaaataatttggtcagtagccaaaaaataagaaaaacaacaattgcaatgcagatataaggtacacgttcccaaaaactatctacgattttgtcgatagtggtataggcatcatggtatttctcggtatgcgctaaaactgtttgagtggttttagtacctgcttcttgcaaaagttcgcctgtattttttgcaacatccgttaaggatttttgttcatcagccacgacaagtctctaattgaataaattcagaaagccttttcagcttccatcatagtaggagataaaatgtgcgcctactataatgagttcatctaaataataaagtgttttttaattaaaagtattccgttcctttttgtaagatttgtgtcggggtttgaatagtatcggtaccagagaagtagtaaaaaaagcctgctgtagaaataaggctaattaaaatagcgattaaaataagccaagccatcagtttttctataaacgttgaaggccgaacgggaccatattgattagtgcccgctgtaccagaagcaagcagtaaataaagcataaaaaagaactgaacgactggaataaataacagtagtcccatccagccacttttatttaaatcgtgtaggcgtcgaacgaccagaataatgttgagatagatcagaaatagccagaaagcccagaccattaaagcgcttataccagagagagagctgtaaaattcaaaattaaatagatcacttgaaagctgaaaacttccaagaaacgaagccagaataaaatagcccacgattgtgactaaataaatcagaccatatccacctaaataactcattcggttaaagcggccatgaattgaaaaagggctgtctttaaacgggagttgaggtggacgtgaagagggagtttcggcaaacatcttattttattcctgcactgcttctaaaagctaaaataatctttgttgatgatcaaaaccatcaaaacttaaaaaaattataaaagtaaaagctatagacaaatgttttaaatcaacttaattttataaaaatgttcataatttcgtatgcttgagtaagtgattaatatatgaccaaagtcgcattgtctaggctttgaaagagtcatcatactgaaaaggcaaacaaataagatccagtaaaataatagccacagtctcgagatgggatgcacaagatcaaggaagttgcgtatgaatgagatctatccagtaccagaggaatttaaaaaaacagctcgtactgttgaagcagactactttaaacgttatcaacactctatcgagaacccagatgaattctgggcagagcaagctaaaattgtcgattggataaagccatttacccaagttaaaaataccagttttgacaaagacaatttcaagattgaatggtttgctgatggtgagttgaacgtatcagcaaactgcttggacaggcatcttaaagaacaccctcacaaacctgcaattatttgggaaggtgatcatccttctcgtcataaaatcgtttcttataaagaattacacgacgaagtctgccgtttcgccaacgttttaaagaaatatggcattggtaaaggtgaccgcgttgtgctgtatatgccaatggtgactgaggctgcaattgccatgttagcctgtgcccgtattggtgcggtgcactgcgtggtatttggtggtttctcaccagactcgttggcgagccgtattgaagatagccaagctaaacttgtgattacggctgactcaagcctacgtgccggtaagttgttaccacttaaagaaaatgttgatttggctctagcattgccgggcacagagtgcgttgaaaacgtgattgtggtttaccgtaatgcaaacccaatcgagatgaagccgggtcgtgatttgtggtatcaccttattattatggaggtggatgcaaactgtcctccagaaccaatgaaggccgaagaccctttatttattctttatacctctggctcgacggggaaacctaaaggagtgttacatactacaggtggttatctggtgtacgtagcgagtacctttaaagaagtttttgatttaaaacaagatgatgtgtactggtgtaccgctgatgtcggctggattacaggccatagttatctaatctatggaccattggcaaatggtacgacgaccttaatgttcgaaggtgtgcctcagtatccaacatgggcacgtcttggtcatgtggtcgataaacataaagtctctattttatatacagcgccaaccgcgattcgggccatgatgcgagaaggtgattcgtatgtacgtgaaagtaaccgtagtagtttgcgtttgttaggttcagtgggtgaacctattaacccagaggcttggaactggtactacaacgtagtcggtgaaggccgctgtccaattgttgatacatggtggcaaaccgaaacaggtggtattttgattgcgccattaccgggggcaacagctttaaaaccaggttcggcaacacgtcctttatttggtattcaaccagcgattgtcgatggtgaaggcaatgaactagaaggcgctgccgaaggtaaccttgtgattaaagattcatggccgggccagatgcgtaccatttggggtgacccagatcgttttattgaagcttacttctcgacctttaaaaatacttattttacaggtgatggcgcccgccgtgatgaagatggctattactggatcacgggtcgtgttgacgatgtcttaaatgtttcaggccaccgtctaggtacggctgaaattgaaagtgctcttgtatcgcatgaagcggtggcagaagctgctgttgtgggtatgccgcatgatattaaagggcagggtatttgtacttttgtgactttgcaggcgggggttccagagtcggaagaactgcgtaaagagttaattagctgggtacgtaaagtactcggaccagtagcttcaccagatgcactgcactgggcgccggcattacctaaaacccgttcgggtaaaatcatgcgccgtattttaagaaaaattgcagcgaatgaactggatagtttgggcgatacctcaaccctagctgaaccggcagtggtggatcaactgattacgacagtttatcctgatagacaaaaataacgttttaataaaaaagctccgataggggcttttttattaaacctgtttaaaattttgctagaaattcagcagtattttgtacgcttgcaaatataccaagagtagctaaaaaagcagtttgtacatcttcggctttaacagtttttccgttatggtttaaatcacgggtcgcagtggcatctccaattaagatgggttgataacctaactctttggctgcacgtgtgccagaatcaatacaaatatgtgtcatcatgcctgtgatcacgagttgttcaatttgatgtgcttttaaaagttcttctaaattggtttctaaaaaactgtttggataatgctttgtcacgattaatgaatcactgccagcactgagttctggatgaagtaacacaccttcagtattttcttgaaagaagctggcttgtggcgggttaatatgttgcacataaataattggtaaatctttttcattaaaatattgctcgagctgttttattttatcgagcgcttgatctggtccaaccaattccattttgccatttttaaaataatcattttgtacatcgataactaatagtgcttgtttcatgagaatactcttgttggtataagataaaacaaggttattctctgctcgcaaaatcggctatagtcctatgaaagcattatcgccagttttctttcgccatgaaaaatgaatattgaattagacccgattgatctaaaaattattgcattgctcaagcaagattctcgcttaacaaataaagaaattgggcagcgtgttcatcggacagggcaggcagtaggtgctcgaattgctcagttaatggatgcaggtgttattaaaaattacaccattgccgtgcaatacaggcataaacaatttattcatttgcatttaaatgaacagcgctcctttgaagaaattgaaaatttagtaaagcaatatgaacaaatcgatgagtgctttaaggttatgggtaatgcttgttatatgatcgttagtcatttcgaaccagcagaactcaatgcttttattgaagtcctctcaaaatggtgtcgttactcagttgaaactgttattcgagaagtagagaaagcttaaaaaataaaagctccaagccgagtcttgggactgttctaaattttgtgtaagtacttaattttcatttatccttcagaggataattacaaaaggtacttcacatggatgaagcaacaatcaaaagtatggctgccgaattggctaaaggtctaaaaacaccagaagacttaaaccaaatgacagcagtctttaaaaaattcatgattgaaactgcactcaatactgaactttcagaccatctcggttatgaaaagcatcagcccaagaaaggctcaaatagccgtaatgggtttagttctaaaaccattacaactcaagatggacaactggctttagatattccccgtgatcgagaaggttcatttgagccacaaattatcaaaaagcaccaaacacgcatcaccagtatggatgaccaaatcctctcactgtatgcaaaaggaatgactaatagggaaattgtagccttcttcaaagaaatgtacgatgccgatgtgtcagcatctctcatcagcaaagttaccgatgctgtgattgagcaagtgactgagtggcaaaatagagccttagatagcctttatcctgttgtctatcttgactgtattgttgtcaaagtccgtcagcactccaatgtgattaacaagtccgtataccttgctttaggcatcaatatggatgggcaaaaagaattactgggtatgtggattgctcagacagaaggtgccaaattctggctgtcagtcatgacagagctaaaaaatcgaggagtacaggacattcttgttgcctgtgtagatggattaaaaggcttccctgacgcgatagcctctgtttaccctcatactgatattcaactgtgtatcgtgcatgttgtacgcaatagcctgagatttgtaagctggaaagactacaaagctgttacgtcgggtctgaaagcgatttatcaggcaagtacagaggaaaatgctttaaaatccctagacatcttctgtgatcaatggaatcaccagtatcccaaaattggagaatcctggcgggccaattgggaaaatatccgaacgatctttagctatccagccgaaatacgtcatgcaatttatacaacaaatgcgattgagtcgttgaatagcgtaatacgccattcaacgaagaaaaggaaaatcttttcatctgatgactcagtaaagaaggtcatttacttagcaacatcaaatgctgcgaagaaatggacgatgccaattcaaaattggcgtttagcaatgaattggtttacgattcagttcgatgatcgattaaaagatcatttataaaaaatggaacttacacaaaataatttacaggctccgagtcttggagccaatatgtctttatttttatttattgtttttattgtcttgcgctgttttaactggaggttttaggctgatttagcttgaatttctacctccttttcctgttgtagttctaactgacgaacgagcggcagaactttttcaccaaagtattccacctcttcaataaagtgtaagaaacctgaaagaatcaagtcgacacctacatttttaagcgccacaatccgctctgcaatttgctgaggtgtaccaattaaattggttttaaagccatcgttatattgaactaaatcttcaaaagttgattttgcccagttgccttcttgttctggtgaagcggcacccgcttcacgagttgcatcgccaaacgcatttactgcttcagtgttggctttatcaataatttcttgaagtactgcttttgcttcttcttcggtatctcgagcaataatgaaagcgttaaccccaattttaacttgatggttattggcttttgctttggctcggatatcttcgacctgtttttgaatttcttcgacagtattaccattggtaaaataccagtcagacacacgagaggccatgtcacgtgcggcacgtgaactaccaccttgaaagacttcaatatgcggtttttgcagaggtttcggcttaagtgtgtagttctgaaattggtaatacttaccatcgaaactatagttatcggtggtccagattccttttagcgtgcgaataaactcttcagagcggacataacgttcatcatgctcaggccattcttcgccaatcgcatcaaactcacctctgaaccagccacttaccacattaatggcaatacgaccttgagttagataatcaatcgttgcgagttgtttagctgcaagtgccggtttccaagggccgggcagaatagccgcaatcactttaagtttctcagtttttgcaagtaatgcatgactgaaactcacagattcatgctggttttctgccccgtaccctgccgtaaaacgaatttgggtgagcgcatattcaaaaccattgttttcggctgcctgtgcaagtcgaacattgtagtcataactccagtctgtacgctgttcgatgttacttacgacaaggccaccgcttacatttggtacccaataagcaaatttaattggttgttgtaattgcgtcatggtgctctctccccattcgttatttttatttagctatattgcgcttaggcaacatgcgttaatgatttaccggacttatgatgcaaacgagattctgctgcatcgagatttggtacagctgctgaaggcaatacttcttcttgctcaatttgcttgttaataccgagctcttgattcgcttgctgagatttaggtttaaccacttcagcacgtttacctttcgctggtgcccattctaaaattggcaatgcacgcgctacggctagcgtaatacggtcagataactgttcacttttcaccgtatattcaggagtaaagtcgcgatctgttgcgtatacgccaattggtaaagtttgcgcctgaaagaagctaaacaatgggcgaagctgatgctctagtactaatgcatgacgatcactaccacctgacgcagctaaaagtacaggtacatctactaatgcagtttgttcaacgaagtcaaaaaagtgtttgaaaaggcctgtaaaagaagcacggtagacaggcgtaccaacaattaaggcatctgctgcttcaaccgctgcaaggtcatcttgtacgcgctgcggaagctggttgcgataaaatgcgccgcctaataagggcccgatttcactcaatttaataaagtgaactttaatatcaattgcttcagataactcatcaagaatggcctgaaccagactttcggttttagatggcgtattcaaaccaccagaaacagcaacaatatttaagggttttgatgatgtgataccagtcatgatttggttcctaagcctaaaaaagaagattggacttattaatcaacaatgctggcgaactgtaaaataacgaaattggtcaaccttatcagttttaaatataaaacccgaatagttgatttttattatttaatagcgaattaaataactgtttttattttatataattattgatgatatattttttagaataaaaataaagcttatataaaaaacagattaattttgattaaaaggtaaaaaacatctgaaaatcgaagcaaaggtctgtatttaacaacattttgcataaaaatggataagatgagcatatctttcatctaaatagtagggttacaataggccatacttatgctcaagattactttaatcgcttatgaatattttaatcgttgatgatcatcctttgtttcgtcatgctttgattcaagcagtacgttatagcctgccgcaggcacaaattcatgaaacagcttcggttgatgagttttatgagcgtttggaaaatggggcagaacctgatctggtattactcgatttaaacttaccgggtgcttcaggcttttcggctctggtctatgtaagagcacaatatccatctattcctattattgtggtttctgcacacgaagaagcgtcaattattcaacgtgcaattgcgcatggtgcaatgggttatattcctaaatcggctcatccaagtcatattggcgaagcaatccgtcaagtgttagatggggaaatctggttaccgccaaacttgccatcaaatattaatcttgatccgagagcggcagatgaaactgctttggctgaacgtattcagtcgttaacgcctcaacaattccgtgttttgatgatggttgcagaaggtttattaaataaacaaattgcttatgaactcgatgtttcagaggctaccatcaaagcgcacgtaacggctatttttagaaaactaggcgtacaaaatcgtacacaggctgtattggcaattagtgcattaaatattgaagataaaaaaatctaaaataaaaaagacctcaattgaggtcttttttatatgttccacttaggcaaggcaatcttgcttaggtgttaggctatcgcagtacagtgggttaagagcacattgcaaatcatcaatttgttcttgggtcacatagcccttgctttttaaatattcagctacacagtcatcacgcaagcttaagaacgccgcatcataaacacctaaatcaacaaagagagctgcggtttctagactattgaaccggtcaaggaaaatatcattgccatacattaagaagatatggtcaagttttgctttttcatctacatgcaaacgttcagcaagttgatgtggaggtgtcttaataaacagcaagtcagaaagctcatcgaactgagtcatatctaactggttttctccgagtttgacatgaccaagccaagccttgaaaaccagaacagcaccaccgcgtagaagcatactccagatttgatggcgtgtctcatggtcaaggttttcactttcagcagtaagaacttttaagaagttctcttcttgttgggctaatttatcaaataaacctaagccttgcggatgataggcagcaggcgcaaatacatcaaaatttagatcatgaaatacattaagtgcgagaggtacagcacactgataaatagtattgagtgctttgatatgtgcttcgctcagcttgctatgcggaaaaatactttgccaatctaactcaggaagtaaggcattggcactgtattgacgataaaattgttgagacgagagttgcccttgtggggtgttatcagaaatattcatggcagttatcctttgcattcattctagagcagtgaagctatatagattggaaatcgatttgataattcgttatacaatttaaaaattcgttttgaatatttatgtgtcatgaagaatgcaagtagaatacgactaaagtcgtataaggtgattttttgtaaataatctattataaaaacaattatttattaaattgtaactaagtatacaagtgttcacttacaaaaaaggtgggctttgccatagaaaaaaaggcattggaaattttggtcaatgatttaccgggtaaaagtagactttttgagcagttctgcctattggcttaaattcagtcaaacatttttgccaagaaccgcttcccaaacttatcaaaggttgggaagcgataaatgattagtctgtcgtgctggcaattttaagcccagataaccatgctcttaatgaagcaggttttaacggttttttgagtaaaacaatattcagttcttttaattgctgcggtaactctgggtgcgagtccgctgtaattaaggcaacaggaacatcttcttgacgattttgagtaataaaatcaaccccaagttgattgtggtttaaatgctggtcaatgagccaaacctgaatattctctttttgaataatttctagcgcctgttcaggttcagtcgctttgaaaacttgataaccccatcgtcctaataaactactcattccttcaagaatagtttcatcattgtctaggcacaaaatacggtaggctttagtttttaaaggtacggcttgtacagctggtgttgcaacttttggtggctcgacaataggtacttcaatcataaagcatgagcctttgcccaactctgagtaaacatgaacagggtaatttagcaaacctgtcatacgttgtacgatggcaagtcctagccctaaaccttgttcaccccaaggtgataaatgcccgcagcgttcaaactcttggaatagcttaatccgttgttcttcagcaatacctggtccagtatcccaaaccccaattcgaatatgtccagactgctgcgcagagcggagtacacccaccaccactcgacctttagcggtataacgcaaagcattactgacaaagttctgaataatacgacgaatccactgcgggtcggtatcgatccagaaagacacatcgtggactttcagtgagatatttcgctgagcagcgatcgatttaaactgcaactcaagatcactgagcaaatcatgcaacggataaggttgtctctttggttgtatggtgccgccttccaaacgtgcaatatcgagtagggcagagagcatactttctgctccatagagtgctcggtcaagctgttgtagggtctggcggtcttcttcggtcgaaatactttgctcaagaacagtactaaacagacgagcagcatgcataggctgtaatagatcgtgacttgccgcggcaataaatcgactttttgacatattggccatatcagcttgttcacgtgcaagctgttgttcagttaaggcatcggcaagctgttgtgttctatcttttacgcgggcttcaagcacggcttcgttcgcacggaaggccgtaatatcggcaaatgtcgttacaaagcctccacctgcgattggatttcctctcatttgaattacacggccatctttacgaatacgttcaaattcgtgagcacttcccactttcatccagtgaaggcgtttacgcacatgttcttcaactgaaccgggaccacattcaccgcgttcggcgttataacgaatgaggtcggcaattgggcagcccacataaacgaggtcttttgggtaaccaaacagttttaaatattggttgttccatgcgaccaaacacatatttttatcaaccacgcttacaccttgggtcatgtggtcaatcatggtcataagaaggttctgattaaaacgttgccactgcgatgcttggtctaaaatattagccacttgccctaaagcaagaccgttattaatcattgctgttgtgagcaatgtacgtgcagaagcggcaccgataataccggccagatattgctcggtaaaacgccaccacatgccattggcaatactatttgggttgagggtgaggtgattttgctcacaaaaattttcgaacgcttgcgtagtgggttgctcacccgtaattctcttggctagggcaaataaatcacccacttttaagcgggccgcatcatgcggaagataggttaaatcagtagatgtgtgcggtgatggtaaaggctttgtttcataataaaagaagctttctgcctgaatttgctcagcgacgcttggtcgataaatttttgaaatccagatatataaaacaatatttaaaccgagtgaccaaataacaccgtgagttaaaggtgcaaatgactcaaaaccaaataaagattccgggcgtagggcattaatgccgaaaggaccgaaaagtaaaatactttgagcagtttcctgataggcttcaggcaagctacgcaaaatagttggaaatagtaatgtataactccacattaaaaatccaataataagtcctgcatagacgccttgacggcttccgccacgccaatacaaaccaccaatcagtgcaggtgcaaactgtgctacagcactaaaagccaataagccgaaaactgaaagttggttaatgtcattaaagaaatggaagaataaaaagccaagtagcatcactgcaacaatactgatacggcggctaaatttaagaactttaggtaaatgcttatcgtgacgtgacagcaacttaaatcgccatagagcaggcataatcaagtcgttactgagcataatagacaatgctactgatgacaccagtaacatgcctgttgatgcagaaaacccgcctaaaaaggccagtaaggccagccactcttggttataacttaaaggcaatgacagcacagccacatcaggcacggtcagaaacttcggtgcggcatgtaaagcccagcttgcaatcggaataatggcaagaatagttaaaatgagataaactgcgaaccatttacgggcaccgcgaatatgcttctcatcgcggagttcgaccacagccacgtggaactgacgtggtaagcaaataatggctaaacctgccaataatgtttgaatccagaaagtttcgggtacaccaaagagctgaacctcctgaaaagtctggtttacatcagaggtcatttggctcaggttggccggtgattcaaaaataaaaaataaagcgacacaaagtaaggcaaataacttcacaaatgattcaaatgcaactgcaagcatgaggccgccgtgttgctccgtgtttgcaatctgccttgtaccaaaaatcatggctaaaattgcaagcacactggtgagcaataacacgctgttggtcgtcgtatgaatatgcgagctttgctccataatgaccgaggtacttaaagcaatcgcacgcagctgtaacgcgaggtaggggataattgcaataacggcaagaatagtcaccaacgatgcgagtacaccacttttaccatagcgtgccgcgacaaagtcagcgattgacgaaatcgcatgatgctgacgaactcgacctagacgccgccagatatcataaccaaaccagacaaataacagtggacctaaataaataggtaagaagatgacaccttcacgtacggcagccccagttgcgccatagaatgtccaagaggaacaatagacacctaaagttaagctaaataaaaacatacggccacgcgtgctaagacgactggcatgcttctcaccaaaaaaagcacagacaaataaaagcgcaatataaagagtgagcaccccaataatcagccagctgttcatatgacctacataagtgaaaccttatgcctatcataacccaagccgaaacaaagctataaattgattaaattttaacgaccaaagtctaagttacgactgagctggaatcttgctaactttaataatgaaaaaatacattaaaaaaaagtgaccaaggttgggcactatgtaaggagtttggttatggatcaaagccaagtagaacagattctacgtaatccaaagtttcaaaaaatggtcaagaaaaaaagtgcattaagctggacgctcacaatcatcatgttagtgctttatgtgggctttatgctacttgtgggctacaacaaagaatttttgatgagttcctttagtggtggtgtaacgacatgggggatcccgctaggtttaggaattattgttttatctttcctactttgtggtgtgtattcctatatcgcaaataatacccttgaccaattgagtgaagaagcgttgaaggaagttgaagccatcacgcatgagaaaggactacactaatatgaaatggaattcattcaaagcgaaagccttattggcagcagcatcgctatattcaactgttgctatggcaagcccggacttaggtgaagcagaacagcaagccaccaactggcatgccattatcatgtttatcatctttgttggctttaccttgtttattaccaaatgggcggctaaacaaactcaatcagcgcaagacttctatactgctggtggtgggatcagtggtttccaaaacggtttggcgattgcgggtgactatatgtcagcagcgtcattccttggtatttctgcaatggtgtttagctcaggttttgacggcttgctctattcactcgggttcatggttggttggccaatcgttttattcttggtggcagaacgcttacgtaaccttggtaaatataacctttcagacgtagtgtcattccgtcttgaagaaaaaccagttcgtactttagctgctttcagctcgcttgttgtagtcgcgttctatttgattgcacaaatggtaggggcaggtcagctcatcaaactattatttggtttgaactataacattgcagttgtgattgtcggcttgctcatgatggcatacgttattttcggcggaatgctagcaaccacatgggtacaaatcattaaagcagtgatgttattaagtggtgcaactttcatggcctttatggtgatgaaagcggttggtttcagttttagtaatatgttcacccaatcaattgaagtgttcagtaaagttcatgatgtaagctttgaagatgctgcaaaaattatgggaccaggtaaacttgccgcaaacccgattgatgccttatctcttggcttagcactcatgtttggtacagcaggtcttccacacattcttatgcgtttcttcacggtaaaagacgcaaaagaagcgcgtaaatcggttgtcgttgcaacaggttttattggttacttctatcttttaactttcattattggtttcggtgcgatccttttcgtatcaaacaacccgcaattccttgatgttgcgaaaatggcaatgaccggcaaacttgagcttgttggtggtaacaatatggcagccgtgcatttaagtgacgctttaggcggtgacttattcatgggcttcatttcagcagtagcgttcgcaacgattcttgcagttgttgctggtttaacactttcaggtgcatctgcgatctcacacgatttatacgctaacgtatttaaaaaaggtcaaaccacgccagcttcagagcttcgcatgtcaaaaatcgcgacgcttggtttagcaatctttgccatgattttaggtattttgtttgaaaagcaaaacgtagcattcatggtaggtttagcattctctgtagcgtgttgtgcaaacttcccaattcttgttctttcaatgttctggaaaggtttaacaactcgtggtgcggtcattggtggtgtagttggtcttgtaacagcggttgtactcattattctgtctaaagcagtatgggtagatactttaaaaatctctgacaccccaattaacccgttcaatggtcctgcattatttgcaatgcctttgtcgttcctttgctgctggttcttctcggtaactgacagctcagcacgtgcgaaaaaagaacgcgcttctttcgacgctcaatatgttcgttcaatgacaggtattggtgcttctggcgcatcagaccactaaaatcacaaccacttgaacatctcaaaaaagccctacggggctttttttatttatctcataaagtattttgaaagaagctccttaataaagaacaacttgtttatcctattttttgtacagtatgattttctataatccaaaacataatgaaaaaatggaaaataattaaatgcgatctatcattgaattctggtcgagctttcgattgttgccttctgcatggctgctgttggtgcaattcattttacttattctggctatgctgacttttgataatgaggcttacaggaccttaacttgggcgctaggggtacttgcattactcattattgctaaagttattcgccaaacacccatgttcacttttcttggtctcgcatttgtcagtggggcaattatagcttcggtctttattttattaggctatagcaatttaaccatccagatttttgcccatagctgtgaagccttagcttacttttcggctgcttatggtttatttcgctatatgtttgctgaccgatatttaacccgcgatgagttatttgcagctgccgcagtttttaccttgctggcttggggatttgcatttttatataacatttgtcagttactcattcctaatagctttcaaaatccaaaccacatccatcacttacaaacttggttagatttactgtttttaagctttagtttgcagtcagctacgggactgtctgacttaatgccccttagtccaccagcacgtgttttagcgatgttacagatgttttgtggagtgatgtatttagccctaatagttacgcgtttaatcgctttacaatatattaagcacacgcctaaaaagaattctgataaataaagaaggaggtgttttaatttatttacacctttgtaactgcaatattatttaagtttatttaaagtattatcggctttctctattgaaagatataactttgttcattcctgaatgtctttattggctttaagcctgtcattttcattaaaataacatggaggatttatgccttccaaacaagcgagttggttcgcaaatgttaatcccaatgtctttttgggtacggtcattattattgctttgttcttagcagttgttgtgatcgctccgagttcttttgaacttctcacgcaacagttaaagcagtggatcactgattcttttagttggttctatgtcttatcggttgccttctttcttatcctactcatttatattgcctgttctgcgattggacgtattaaattaggtcctgaccatagccaacccgaatatagtaacggatcatggtttgccatgttgtttactgcgggtatgggtattggcttaatgttctttggtgtggctgaacctgtcatgcactatgtcaacccaccaagtggtgagccacagacaattgaggcagcacaacaagctttacgtgtaacctttttccactggggcttacatgcatgggcaatttacgccgtggtcggtttagcattagcttattttgcttatcggcataatttaccgctaaaaacccgttcagcactgtatccactgattggtaaaaagatttatggaccgtggggcgacagcatcgatatatttgcgaccattggtacggtatttggtgtagcgacttctctcggatttggtgttacccaaattaactctggtttacattatttatttggtattgagcaaagcaccactactcaggttttactcattatttttgtgagtattctcgcttcattatctgtgttcttaggactagataaaggggtcaaacgtttatcagagctaaacttagtattagctttaatattattagtattcgtttttatcgctggccctagtatttatttacttcagaccactattcaaaacactgggcagtatatctctaacctttttaccatgacattcaatttatatgcttatcagccgaatggatggattgggggatggacgattttatattgggcttggtggatttcttggtcgccatttgtaggtatgtttatcgcaagggtttcacgtggtcgtaccattcgagaatttattgtcggggtactcctcattccaacaggctttaccattatctggatgggctttttaggaaatgctgcgttatttagcattatccatgaacatcaaaccactttaattcaggctgttcagcaagactcgtcagttgctctatttgagtttttaggacacttgccatggtcaggtgtcatgaatattctggcgactattttggtggttttattctttgtgacttctgctgactcaggggcattggttactgactacttaacagcaaaaacagaaaattcacctacttggcagcgcctgttctggacagtgcttatggcggtgctggctattattttactcttggtgggcggtcttgcggcgcttcagtcttcaatcattatgagtgcgttgccttttaccgtagtcatgctgttaatgagttggggcctaataaaagccttgcatcttgatgttactaaaatgatagcaattcaagaggctcgcattacaccacgtgccattcataaccctagaagctggcagcagcgtcttggtttaatcatgcattatcctcatagtgaagaagaggtgaagcaatatattgaaaagcaggtttcacgtgcttttgaaaatattcagcatgagtttagacgccgtcatcttgaggtgtcgattagtgaagtggaagatggtatgcagcttcgagtcgatcatcatcatgaaattaattttatttataaagttgtttcacgtgaaacagtacctccaagttttttaattggtcgtacagaagcagaagacggtcagtattttcaagctgaggtatttttgagagaaggcggacaaaactatgatgtaatggactggactcaggaagatttgattcaggatattattgatcagtacgaacgtcatttacatttcttaaatatcgtacgcagttaatagccataaaaaaaggactcaattgagtccttttttttaattcaatttctaaattaaattagaaacggaatttagcatttaagccgatagtttgtgtatcgtagctagactttttaacgtcagctttcatgtaagatgcaccaactgctaaagcaggagtgatgaagtagtttacgttaccaccccaagcttggcggaattcaccaaggtcattacctttgatgtcagcttcgccatcgttaccaacgaaagtagcgccaacacttaacttaggagttaagtaaaggtcagtttttaaaccgtattggttttcttgaccgaatgcaccagcagcttcaaaaccgattgccatgttagttccatcgattggaccaacatatttagcacgtgctgtaacagcatcttggtcgttttggatagcagcagtttggttaacagcagagtagataccgttaccgatgataccgaagttatctaaagcgaattggttagcaacacttgtataaccaacagtcattaagaagttaggtaacaacatagcaccaacttctaatgcataacggtcaccgttgtcatctttagagaagttgtttttaccatcaacatcagtgtggttgtaagttgcgctagcatatacaggaaggtaaggagttggaacgtatgcctcacctttaacaccgtatgtaccaatgtggtagtttacgttgttttggtcatattgttgatagctataacctaaagacacgctagaagcttggtttaagaaagctgcttcagctaaaggacccttagctgtatcaacatttttcaaatagaatgtaccagcaacgtcaccagtgaagtttttatcatttgcagttgtgtcaacatattcagattgaccttgaacttcaaattgataagcatgagcaccggtcatggctaataatacagcagtggctaaaccaagttttttcataatcatttccagcattaacaagagataaagctggggtcattgtattgtaacaatttatgaagtcaataatagatgaaacgtaatgttaaggaaatttgacacttatgttaaaaatggttaaaaaaacaacaattgaagtatattatgtcaacctgctaaaaaaatgaacattaacaagagtctaaaccttaagtttcatagggaattgacactaaatagtttaaaaataattacatttacaattgaaaaaagcgattttattaatcggttttaacgttaatttatttgtcgacttgtttaataaatagccactcaaacattattcttttttcaattttgctgtattttgagtaatagttaacactattttgataagttcatctaaataatctatctattttgaattattatataattgaataaagcaaaaaaaatatgtttttaaactaaaaaaacgattaaaaaattaattctgatcaatttaatcaactttacaaaattagagataagtcacacaattcaattgcaaagttcactatctaacatttttagagttagaagtgctttcccagatacgatgtgttatcacatcagactttacgagctcagctttccccaaggttgagcttttttttatctataagaaaacattaatatttattaaaaaaaatacatgaaatttcttctattgagtgtgtataaaaaagaacccagctgagggctgggtttaggatgctgggagaaacatccaagagaaaaaagaagctaattataggattgcgaaatttacatcatctgtaaaatggagttttgctatagccatcatttgctctttcgatcaaatttttaagaaatagaaaagatgaaagcgtatattgcgttaatcgaactttgttgctgaacttctgttcagtaaagtgctaggatgcggattaattacttcattctatagtagtgatcatggtaggacatttacggagtaccagctagaaatgtcaggattacgttcagaacatatcagtaatcgactgtttttcttcatgttggtcattattttgtccttactgtttatggcggttccgcttattgtcagcagttatcaagaatatttaaaaactaaacaagctttggttgaaattaaaagcttaagatcaattgctgaagttgcaaataaagtctctaaagaacgtgcgcccgcaaataaattaatgtcgagtaacgctgccgactttttaaaaaatcaaaaaaacttaaaagaatatcgcctctctgttgatcgccaacttaatgaaactattcatattttaaaagaagaaggttataccgatttagcaaataccttagatactaaatttagagatgatttaaaacaggcgcgtgctgtagttgactattatgttgcaactcctgaacaagcgagaagctctatacaattcgataatgcaattttggctatgtttggagcttgggatagccgccgagaagttttacaaaatttgatgctacagttaaaaagtaaagatagccaaattaacaattattttactttgattgtggttttgactgatatgcgggatcaagctggtcgtaccgcatctaatgttattgcgcctgtgacctttaaagaaactatacctaatgataatcgggcgcggtctttgcagactcagcagcaagcacgctacttatgggcacttgtagacacactacagtcagagcaagctaaaactccggaatatcatcgcctttactcaagggttaaaactgaatttttagataaaggcgtacctattgtgggtcagcttttagatgaaagccaaaagcaccaagcctatcatttaaatggaacagagctgacagaccaaatcgttgataaatttaccacggttattgatttgcaaaagtttttacttaataaaagcgtcttaattgcatctcaagaaaactatttagcaaaaaagaagtttttccttactttactcatttcaagcatatccttagcagcagcgttacttacactaatttatgcaaagagaagggtgtttgagcctcttattcaggcccgtaccttaattcttgatttatctcatagcacagattacccaatagatgagttgaaacctaaaaaaggcgaatttatttcgttgttcgaagctattgatcgtttacaaagaatgctcaagcagcgagatgcttttgaattccagcttaaaaatattgctaatacagatccattaacgggtgtatccaatcgtttggctttatctgagtatttaaaaattgttgagagttaccctcaacaattttctcaaacttgtttgatgattattgatattgatcgctttaaacacgtgaatgatcaatatggtcatattgtgggtgaccaagtgattcggcgtattgcagatcaattaaaagcaaatgtacgggcttctgatttaattgttcgttatggtggtgatgagtttttaattttgttagaacaagtgcagtttttagatgcacgtctcttggccgaaaaaattcgtattgcgatttctttagaggaaattgatctatctggtacacaagaaaaattgcatgtatcggtcagtattgggtttgcgattggagcgacaagctggatggagttattagagaacgctgatcgttcactcttaagagctaaagctcggggacgaaatgtagtagagggataatttaaaccttgtgaaccttattttgaaaaatgaaattatttatgttttattaggaggctattgaattgaaatatactgaattatgaaagtattagataaagaaaaaagattaaaagaattattagaaaataatataagaaatgaaaaaattggtacagcaattgctattactggtccttggggagttggtaaaacttttttttggaaaaagtttatagaaaagaataattttaaaaggaaatatatatatgtatctttatttggtcttcagtcattgagtgatttgaaaacgcatatttatagcaatatcgaaaataatcattctactttagaagttcctagatggattcgaggattaccagctatttttaaagatacaagggtttcacactttggtttaagtacttctactaaaatttttgatagtttgatgtttagtcaggtcaaagatgcaattatttgctttgatgatttcgaacggatgtctaataaattggatattaaagatgttatgggattggcaaattatctaaaattagaaaaaaactgtcaggttattttgattttagatgaaaataaaacagcaagcgaaaataagaaaaattatgctgaatacaaggaaaagttgattgatacaacaattcctattgactcagtgaaatcattaattcaagaaaatacagaagactttgaaggagatgaaatacttgttgagttgatgtttgagtttgcagaaaccttagaaatccataatttcagattttttcaaaaagtaatcaagttatatcgagattttaggaagtcattacctgaggcagtcgctgactcaacaaaagaaactattctaataagaattcttcaaggctacttaattcaggatatacctgaattagaatatggatggaatgactgtaaatattttcccttagatcagcaaaaagattggtctgatagaagaaaaaaaacttataagagcctaattgatctttcaaatgtgtgtataaaaggtgatggtgacctttggtttattgaatttaagaaatggtttgatcaaaaagagaatttttctattgaatcaataaaagagttagctcaatctgaacttataagtgataaaaataataagttaaaagataaactctcggctcttttcgatgagcgagataattatcaggcgagtgatgattttatagataggttattttacctagcttgtcagtgtattggggtctcttctttattagaccttagagcgtgtatctccactttagaagacttcgatgaattagaaaaggcccaattgcttgaaacaaaagttgagctttggattaaagagaaattgtcaaaaaatagaagcgcttttaaaggcagtgggctatttggttcacatggattcgaagattttatccaaatgtttttaaagcagaatccagatttagacttacctttattaaaagatgcaatttataacaagtatataaatcaatattctgaacaagatataaagcgtattactagtgctgataaaactagtctctatcaatttatttttaaggactttcctgaggataatcgatttttaaataccagagttcataaccttgttgttaacttacctaatgtgcaaaaagaacttttaatagagatattaaatgagagagcaaaaaactctaattttcaaaaaaaatatgcaaattatcttatttctaaattaataaacgaaaaaaaggagtcctaagactcctttcttgattacttcaacatcggtttcaagaaacgtcccgtatgggaaatttcaaccttggctacttgttcaggtgtcccttcagcaatgatcataccaccgcccgaaccaccctctggacctaagtcgacaacccagtctgctgttttaatgacatcaaggttatgttcaattaccacaatggtattacccttgttgcgtagctcatgcaaaatatcgagtaacttggcaatatcatggaaatgcagacctgttgttggttcatccaagatataaagcgttttacccgtatcacgtttcgctaactctcgagccagtttgacacgctgtgcttcaccaccagataaagtagtagccgcctgacctaaacgaatatagcctagacctacctgagttaaggtttctaaacgacggtgaataactggaatagcactaaaaaactcagcagcatcttcaaccgtcatttctaaaacatcagaaatgtttttacctttatagccgacttcaagtgtttcacggttataacgtttgccatgacaagcatcgcaaggtacatacatgtctggtaagaagtgcattgcgactttaatcataccgtcgccttcacacgcttcgcaacgtccgccttttacgttaaacgagaaacgacccgcactataaccacgagctttcgcttctggtgtttgagcaaataactcacgaattggcgtaaataaccctgtatacgttgcagggttagaacgtggagtacgtccaattggactttgatcaatatcaacgactttgtccagatgttgtagaccatcaatcgagtcaaacttttcagcggttaaggtcgttgcaccgttgagctgtgttgcagccagtgggagtaacgtacggttaatcagtgttgatttacctgaacctgaaacacccgtgacacaagtcataatgccaagtgggatggttaaatcgacattttttaagttatgacccgctgcacctgaaagtttaattttttcttcaggtttaggtggttgagttcgctgttttggcacttcaattttgagtttgcctgaaagatattgacctgtaagcgagtcggcatgtttagccagctcatcatacgtaccttcagcaatgacaacgccaccatgcaccccagcaccagggccgatatcaataatatggtcagctgcacggattgcatcttcatcatgttcaacgactaataccgtattacctaagtcacgtaagcgaattagcgtttgtaataaacggtcattatcacgttgatggagaccaattgatggttcatcgagtacatacataacacccatcaaacctgcaccaatttgcgaagctagacggatacgctgggcttcaccacccgatagtgtttcggcagaacgagccagacttaaatagttcaggccaacactcaccaagaaatgtaaacgctcacgaatctctttaaagattttatctgcaatttcacctttggcaccttcaaggtttataccttgatagtaactttcggcatctccaatcgacatgcgagtaatgtctgcaatcgttttgtcttttacacgaacatgacgtgaaatttcattgagacgtgacccaccacatgcatcacaagctgcattagacaaatattgtgctaaatcatcacgtacatagttactttcagtttcacgatagcgacgttcaaggtgtggcaaaattccttcaaaaggttgcacgcgtgtatgtttacggccgcgttcatcgatataacttaaatcgattttttctttgccagtaccttgtaagaatttcttttgcgtgtctttatctaactgattccatggtgtatcaagttgaaaaccgaaatggtcggcaactttttgcagcattgaatagtaataaggacgttgacgatcccaaccacgaatagcaccttcactaattgcaagctcagggttaggaatgagtttttcagggctaaaatggctacgtgtacctaagccatcacagacagggcaagcaccaaacgggttgttaaatgaaaataaacgtggttcaagctctgcgactgcgcgatcacattcagggcatgagtgttttgcagaaaaaacacgatctgggtgttcgccattcatccacgataaaactgcaatatcgccacctaaacgtagtgcagtctcaaatgattcagcaatacggttgcctaagtcatcacgtactttaaagcggtcaacaacgacttcaatggtatgctttttctttttgtcgagttccggtggtgtatcaatatcaatgatttcaccatcaacacgggcacgaacgaaaccttgaccttgtagttgttcgaacaagttgctgtattcacctttacgctcacgaacaacaggggcaagcaacatgagtgcagtgccttcctcaaggttttttaccgcatcgaccatttcagaaacagtttgcgcaaccataggtaagtcgtgttcagggcaataaggcgtaccgacacgtgcataaagcagacgcaaatagtcataaatttcggtaatcgtaccaaccgttgaacgtgggttatggctagtagacttttgctcaatcgcaatggctggtgataaaccttcaatcgagtcaacttcaggtttttccatttgcgataaaaactgacgggcatatgccgaaagtgattcgacataacggcgctgtccttcggcatacaaggtatcaaaggcaagagaagattttcctgaacctgatagccccgtaattaccacaaatttgtcgcgtggaatatcgagtgacacattttttaagttatgggtgcgtgcgcctcgaatacggatatgactttggctcataaaacatctcaattgtgtattgatgaaaatttaggtgttgagtgatcagccgcagggaggtgtgactggttataaacaacagaccctatatatgataacgatttaaaattgttcaagtggtataaaatgatttaaagcgacaaattgtgacggttaaacgacaaacgacaaaatttgtttaattaagcaggttgtatttttaacattcctccttctacatttctactctaagcaaattttaaccagcaacataattttactagacgactggtctaatagttgtttatgatgaatgcatgaaacgattaaataaaagcgaaaccacacgacaacacattttagataccagttttgaactggtactacataaaggttttgtcggtgttggtttgcaagaaattttaaaggcttgtgacgtacctaaaggttcgttctatcactactttgcttcaaaagaggcgtttggctgtgcgttgctcgagcaatacatggccaattataaagtccgtatggaacagctttggcagcacagtgagcaaagtgcccatgcccgtttaatggctttatggcaagcgtggattgatgatccggtacatggtagctgggctgaaaactgcttgattgtgaaattggcagccgaagtttcggacttgtcagaagatatgcgccaaattctcaatgacggtgtgcacaaactaacccaacgtttggctttgctactcaaagaagggcaacaagaaggatcaattccaaaacatattgatcctttgaaaactgcgcaagtcatgtaccagttatggttaggtgctgctttactcacaaaattgtcgcaagacaaagcgcatctacatctagccttagaaaccacccaacaactcttaaaaccgatagaggaataaagcatgcgaagtattatccatcgtaattttggcgaacctgtagacgttttagagcaggcggatatgccaaagcctgaaccaaaagcaggcgaagtgcgtattaaaaccatcatgtctccgatccataatcatgatgtatggacagtacgaggaagttatggctataaaccaaccttacctgcgattggtggcagtgaggcagttggtattgtagatgcgttgggtgaaggtgttgaacatgtacaggtagggcaacgtattgccgttgcggctgtgcatggcagttgggctgaatactttattgcgccagcgcaagggattattccactcaataatgaaattgatgatgaaacagcagcacaactgattggtatgccaattagtgcactcatgctactcgactttgttaacgttcaaccgggtcaatggctcattcaaaacacggcgaatggtgcagtcggtaaaacggtggcaatgattgcgcaggcacgtggtttacctgtgattaatctggttcgccgtagtgatgcaattgccgagatgcaagcattaggtattcaacatgttgtggcaactgatcagccgaactggaaagagcaagttaaacagattcacggtgaccaacctcttattgccggtgtggactcgattggtggaagtgcaagtggtgaaatgctgaatttactcagtgaaaatagcctgctcgtttcgttcggtagtatgactggcgaaaccatgcagatttcatcgggtgatctaattttcaaacaagcgacagtaaaaggtttctgggcgagtgtagttaataaagaaatgccagcagctcgtaaaaaggaactgatcgttgagctgctaacattagcgactcagaaaaaattaatccttcctgtagaaggtgtatttagttttgatgagattaaaactgcggctcaaagagcaacgcaaggcgctcgtcaaggcaaagtattattaaagccgtaaaacactaaaagatcagtcgagagactgatcttttttcatatctttaaaataaaaaggaaaatgtatgatcggacaaatattgattgcgcttattgcgatattacatgtttatattttagtgttagagatgtttttgtgggacaaaccttatggcatgaaagcctttggaaataatgccgaaaaagcaaaactcaccaaagtcatggcacagaaccaaggtctttataatggctttttagcggcgggtttattttggtctttattggctgatgcaccatttgcaacatcaattgccaacttctttttaggctgtgtactgattgctggtatttatggtggtctaactgccagtaaaaagattatttatattcaggcggttccggcattgattgctttagtcgctgttaattttctttaaaaagcgcaaaatacagcgttttgaaatggatatgaccagataggatcagcgcatgtgggcgttatttttaaagtgtatgttgggggctggagttgttctcattatttcgattttatcgaaaagtaaggcattttatattgcgggtttagtcccgctttttcctaccttcgctctaattgctcatgtgattgtttttcagcaaaaaggagccgaagcgttacaaaaaacggctttgtttggtctatggtcactgattccttatgccatttatttagctgctgtttatgtgctggcaacgcgtatgtcgatgtggtcttgtctaggagtcgcaacgctatgctgggttgtggctgcggcaggtttgatttacggctggcaattgtttcaaagttaaattaaacactgaccatttaatgaactaaatggtcagaactcatcttattttagatctgatctaaacctaaccattgtctttgatggtaggcactatcccaaaataaccattcaagttttgcacccatggtataggctgcatgcattttctctaaagtatctgcatcacaacgtgcggcaactttatctaccgtcgcaatcacattacgaacggcggtatggaattcttcacctgcgtaggtatcaatccatgcctgataaggattgtttgggacagacttactcacaatgtctttaccgacttcggcataaatccagaagcaaggtaatagagcagcaagtacaacagggtagctttcagaccaagcagttgctgtcaaaaatgaagtgtaatgatggcctgccaaggtcaatggggtatttttaaattcttctttggtgacaccaaagtttttcataaagtcgtcatgcaaactgcgctcgaccacaattgcaattttagctgcatcagaaaactgcataatatcgtcagcatcaaaagctttagctgctgcaacagccagcacacggccataggccactaaatattgagcatcttgaataacataatgacaaaaagcttctttatctaaagtaccgttagcaagttcctgattaaaaggcaggtcgagaattttttgatataaatttaaattacgttgccagagttcttgagaaaaaagcataaaaacattccatttaaaataagacagctaaacccgattttaaatcaattttaaaatacaaaaataataatgatagatatatcgcaagaaaatatttaatacgattaataagttaatgaaatattataaatttctttattaaacagtgagataaagtaaagtgaataacggcacaaaacaacatcgttttgtggttaattatcgatataatagccgcggttttaagaaagattaaatttagttcttggtataggtctgatccatgaagcatttccgattttcgatattttttacggtggtgtgtttagcactatccgcttactggggttttacccatggacctgaagcgggtgtgtcaaccatgcttaaagctttaaccattaccgcgattttagctgtgatggaagtttctttatcttttgacaatgcggtcgtgaatgcatcggttctacgtaattgggacccgttctggaaaatgatctttttaacggtaggtattttaatcgccgtttttggtatgcgtctgattttcccagtcgtgattgttgcagtgactgctgatatgggtgttatcgaagtagccaaaatggcacttaatgatccgaaaacctattctgaacgtttaatggcacatcacgctgaaatttcggcttttggtggaacattcctattattggttttcttaaacttcttctttgatgacgaaaaagaaacgcattggtttagatggcttgaatctaaacttgcaagcttggcaagcgtaccggcaatgtctgtatttcttgctttgattgctttaatcgtgatggctgcttatgtggacgaagttcaccgcttagctgtggtcatggcaggtatttggggcattgtggtttatattggcgttgaagtgttaagtcatttgttaggtggtgagcctgaaattgatgaaaatggtaatgctgtattacaagatggatcaggcgccgcttctggtgttgtaaaagccggtttaggtggtttcttatatcttgaagtgttagacgcatcatttagttttgatggtgtaattggtgcatttgccattactagcgacgttgtcgtgattatgctcggtcttgcaattggtgctatttttgtccgttcaatgacagtttatcttgtagaaaaaggtacgttagatgcctatgtgttcttggaacatggtgcgcattatgcgatcggtgctttagcattcattatgattgcaagtggtacaggcgtgcatgtaccggaagttgttacaggtttaattggtgtagcgttcattgtttgggcggttatcgcttcaattcaatattcgaagcgcgagcaacagtcgccttaagctaattttcagcaaacttcgataaactaaagaggctaaacgcctctttatttttttaagcccaaatcgttattttaaataaggtgtcccgtatttttagaaacgaatcggcttataatttacttagtttgataacgtgtattgatatgatgaatgctttggaacgtcgctcaacttttgccttaagtagtatttttgcgctacgcatgttgggcttgttcatgattattcctgtcttttctgtagttgggcagtcatatcaatatgcgactccagcactcattggtttggctgtaggtatttatggtttaagtcaggccattttacaaattccatttagcttacttgctgaccgttttagccgtaaaccgcttgtggtctttggtctattgctctttgcgattggtggtgcaattgccggattatctgacaccatttatggcgtgattattggccgtgctatcgctggggcaggtgcagtttcggctgtagtcatggcacttttagccgatgttacgcgtgaagagcagcgtactaaagccatggctgccatgggcatgagtattggcttatcttttgtagtcgcttttagtcttgggccttggctcacaagccttgtaggtatttctggtttgttctttgtgacaaccatcatgggtttgatcgcgattgcgatgttattgctggtgcctaaagtcactcgtcaccatcgtaattatcagcaaggctacatggcacagcttaaacaagtcattcaaatgggtgatttaaaccgtttacacgtttcggtttttgcattgcatttattgctgaccgccatgtttatttatgtgccgtcacagcttattgagtttgcgcatattcctttggcgagccacggtttggtgtatttgccactcttggttattagtctgttttttgcatttcctagcattatcatcgctgaaaaatatcgcaaaatgcgcggcattttcttaacagcaattacaggcattattgcaggtttgcttcttcttatatttggttatcaatcaaaatatgtattactcgctggcttaggaattttctttattgcctttaatgtcatggaggctttattaccttcttggctgtcaaaatccgctccaatccagtcgaaagccaccgctatgggggtaaatgccagtagccagttcttaggtgctttttttggtggcacactaggtggtcaattattgatgttacataatactgcgattggatggagtgtcttagcagggattgctataatatggctgctaattagttttggtttagctcagccgcggtatttgtcatctattgtgctgccattgccgcaagtgcaacaggtgaatgagtggaccacacaactattggcaattcgtggtatcgaagaagttgtggtgatgcctgaccagcaagttgcttatattaaagtcgataaacagtctcttgatgacgcttcgcgacgtgatttaacgcagttgttcggtaaagaggtagccatttaagcataactcttataaagtaaaacatagaaatgtataggatgaagacagctaatgcgtggtgtaaataaggttattttggttggtactttgggtcgtgatcctgaaacaaaaacttttccaaatgggggctcgttgacccagttttctatcgcaacaagtgaagtttggaccgataaaaatacaggtgaacgtaaagaacaaacagaatggcaccgtattgttttgcataaccgtttaggggaaattgctcagcagtttttacgtaaaggttctaaagtttatatcgaaggttcattacgtacacgtcagtggacagaccaaaatggtcaagaacgttacactacagaaatccgtggcgaccagatgcaaatgttagatgctcgtcaacaaggtgaacaaggttttgctggcggtaatgattttaaccaaccacgttttaacgcgcctcaacaaggtggcggctatcaaaataacaaccaaggtggtggctacggccaaaacactggtggttatggtggccaaggtggtttcggtaatggtggcaatagcccacaaggtggtggttttgcccctaaagcaccacaacaaccagcatctgcaccagctgatttagacgacgatttaccgttctaatcaaagtttcgaaaaaggcgagtttatctcgccttttttattattcaattccaagtaaacgtaccagtgctgtgccagccgctgccagacaaatcaccaataaaagcggtgcttttttccaaactaagaaaagtgccaaacccaccccaaatatacgtgcgaaacctgcaaaatggtgaccttcaaaaaatgtagtggtcacagcaatggcacagagcaaaacggttgcgccgtttgagagtaaaacttggtatttttcagaaaatgaaaacttggcacctaagtggaaaccagcaaaacggatactgtacgtacccagtgcgagtagagctatccctacaataatcagtaactgttgactcatttttttctaccccatatcaagccaaaaagtgaaatcaggattggaagtcctgcggctaaaaagggtgtggttatcaacgctaaagttgatccggcaaatgcagcttttcgagtcaccttattctttaaagcagaaaaagtaagagcaattaaaatcgctgggaaaatcgcatctaagccaaatgttttagggtctggaatagcgctcccaataaaataacctgcagtgacaccgagcggccaactgagcatgatgcctataccacatagccagtaagcagcctttttggtttcgaaatcaggctgtgccataccaaacaaaacgctttcatcgttcatgatatgagacccaaaatattgagagaatttgcctcgaatcagttcattgaccgcaatgccaaaaggtagatgtcttaaattgacgagtagtcctgcaattgcagccgcaatcgggctaccacctaccgccaagaatccaataaaaataaattcagcagttcccgcgagcacaaatatggacaggcaaagtgggatccaaagtgctaagccataacttgcggcgagtgaacctaaggacataccaacgacactcgttgctaagcacacaaagaaaatcgagcgagtagtatctttactaagttttctaataagagcgtatgtagtcatggcatgatataacgaacgattttccattataatgaataagtctgattgttttgtcaaaacgaacgatcgttttttttatagaacggatagaatgaatgtctcagccaatcgaaattattgccaaaggtttaacgcgtgaacgccaaagagcagggctttcattggcagaggttgcgcgccgtgcaggtgttgccaaatctacactttctcaattagaggcagggcaaggtaatccaagtattgaaaccttgtgggcactttgtgttgcactcaatattccatttgcacgtttgatggaagaaccgagcaatcaagtgcaagtcattcgctgtggcgatgggccaacggtgagttcggagattgccaattacaaagcaattttgttggcgacctgtccaccccatgcgcgccgagatgtgtatttattgattgttgaaccgggcgaagatcgactttcagaaccacatccagttggttcggtagaacatattattgtggttgaagggcgagctttggtgggtttaattgatgaagcggttgagctgggtgttggagactatatttgttatccagccgatcaaaaacatatatttagagctttggaaacaggcacaaaagcgttgttaatctctgaacaaaactaaagaaattcaatctgattaaaataaaaacaaagagccatttaccagcatcttctacaaaaagggccaattttgcgtataaattttgcaattggctctctcttttattacaaaaatggctctcgtttcttgagtgccgaaacgacaaattaaagccattggaagtatgcatacggaagcgccggataagctcagtgaattttctgttttaggaattgggcagaacggctaaatttttaggggatattttttggcttcggaggatttccgagactagccgatatcctccatatattaaggaaaatgatatggcagctcatcaaaatggttctgaagccaatcactcccaaagtttaaaacatggacttaaatcacgccacttaaccatgatctcgattgcaggggttattggtggctctctctttgttggctcaggcagtattatctacaacaccggccctgtagtttttctaacttatgctttaggtggtctactcgtttggttcatcatgcgtatgttaggcgagatggccgttttaaatcccgacagtggctctttttcaacttatgcagaccgtgcgattggtcgttgggcagggttttcaattggttggttgtactggtgcacgctggcgatgctcatgggctgggaagcttatgtagcaggaaagattttaaacaactggttcccgtttataccgatctgggtttatatgaccgtcgttattgtcgcactggttgttgtcaatttacaaaacgtcaagaactatggtgaattcgagttctggtttgcgctcatcaaagtcatcgcgattgttgttttccttgtgattggtagtttagccattatgcatttgtggccttggggcaatccggctgcatctggtataagtaacttaacctctcaaggctttatgccaaatggcggttcgtcagtgattacagctttgcttggggtgatgttcgcctatattggtgctgaaattgttaccgtagcagcagcagagtctgcaaatccatctaaagaaattcgtaaggcctcgaactcggtggtttggcgtattattttattctacgttggttcaatgttcgttgctgtatgtcttattcctcacaacaatgaacttttaaaagattcgacttggggtacttatagtgtaactctgtctgcacttggtattccgggcgcgcgccatatcgtaaattttgtagttctaacatcggtatgtagttgctttaactcagcgctttacacgtgttcacggatgctattctcgttgtctaaacgtggtgatgcaccaaaaagttttggttctgtaaacagtaaaagcagtccttgggtgggcgtgattgtgtcatgcttcttctctgtaattgcggtaattttaactgcaacagagagtatgaatgtttatgacttcttcatgctaacaacaggtgcagcaacactatatgtgtacctgaccattgcttattctcagcttcgtatgcgtaaaaaattagaagctgaaggcgtgaagattgactttaaaatgtggatgttcccttacctaacctatgtggtaatctttgcaattattggtgcaattcttaccatgttgattgaaggcacctattttaaagaagtgatttacaccacagcattgttcggcattattgtgttcttcggattgttgtctgaaaagctaggttggggtaaagagcgtcgtgcaacccatttaactcatagccatgaagaaaagttagtttaaatttttaaataaaaaagagcctcactgtgaggctctttttgtttgttttaatacgagagaatagttaatttagcgtaggtacacctgcttcacgtaagcattggagcaagacaccaaaagccatcaccatatctttttcatttacacaggcaaagcccatcagcagtccacgttcggcatgtgcatgtgattgcatgtagtattgtgaaagtgggcgaactttgacgccacgttcaagtgctgtggctgcaatggcgacatcatcgcaagagttcggtagttttaaaaccagatgtaaccctgctgcttcatcatattcatgaataaattcggggccaagatagcgttgaattaagctcaccaagtaatcgcggcgtttaccatagagcaggcgcatacggcgaatatgcgcttcataatggccttcacgaataaattcagcgagggctttttgctcaagcaagtgcccaccacgataaagttcggccgcaacaatacgtagcggtgaaaataacggcttagggacgaccaaatagccaattcttaaagatgggtaaatagttttactaaacgtgcccatatataaaacaggtgcattattttctaagccttgcaaagatggataaggctggcccgagaaacggaactcactgtcatagtcatcttctacaatccagctattgtgctgacgtgcgatttgaatcaattgtctgcgacgatcaaggcttaaatgtgagccaagcggatattgatgtgatggtgtgacaaaaatgagtttaggcggtactgccggattttcttcgggaataatgccttcagcatcgacaggcatgggctgaatatcgaggccattaatccgtaacgtattacgcattccccaataagcgggatcttcaatccatactttatctcccatatcactcagtgcacgtgagactaaatcaatggcttggtggatgccttcggtaataataatctggtctgcatcgcactggactgaacgcgcaacacgtaagtaatctgccaacgcacttcgaagctcaatacatccacctgcgttgctataaatcaggcgattaatgtcgggttcgcggcttaagcgtgcttgaatacgactaaaaatatgatgtgggaactcagttacatcgggcgctcccggcacgaaagctccccattgatgcggcgaggctgcggcatagcccaataagttggaaccacgctgcgatagcgcataagagctttgaactttcgggcttgaaaccacttttttcttgttttgtgtatttaaaaaactctctggtaatttttcggcaacccatgtgccgtgtcccgtacgggcttctaagtaaccttcagcctgtagctgttcataggcagtgagcactgtatttctagaaacatgaatttcactggctaagtcgcgtgacgcaggtagacgagtcttgggctggatgactccatcaataatggcaccacgcaggcaacggaaaaggcgttgatgtagtttcccttcagtgtcctgttggagtcgttgcagcaaatgatctccaagtaaactacgcaattggctctctcctacagttaaaaagtggctctcgtcagttggcatcagacgagcgaaattacatgcataggcagtcgttgtaaagcaccctgaaaattaagcacaggatgcaagaaaccaaagctgcaactgatgatgaaaatatgagggaatcaaatggatactcaacattctgcacttaacgcacgtaaacagcaagcaactccacgtggtgtaggcgtgatgtgtcagtggtatgcggaaaaagctgaaaatgccacgatttgggacaaggaaggcaaccaatttatcgatttcgctggtggtattgcggttttaaatacaggccatcgccaccctaaagtcattgcagcggtgactgaacaacttactaaatttactcacactgcttatcaagttacgccatatgaaagctatgtggctttagctgaacgtattaatgaacgcgcgccaattgctggtcctgcgaaggcagcttttttcacaacaggtgcagaagcagttgaaaatgcagtgaagattgctcgttgttacacaggtcgtcacggcattatcacgtttggtaacggtttccacggccgttcatttatgaccatggcaatgacaggtaaaactgcgccttacaaacgtgatttcggtgtaatgccagcgggtgtgttccacgcacgttacccagtacctgcaaaaggtatttcagtagatgcggcaattgaaagcgttgaagatattttcagtgaagatattgcgccacatgacgtagcagcaattgtacttgagccagtacaaggcgaaggcggtttcaatgtggtgccagccgagttcttaaaacgtttacgcgcaatttgtgataagcacggtattttacttgtcgctgatgaagtgcaatctggttttgctcgtactggtaagttatttgcgatgaaccattatgaaactaaagcagacctcatcacgatggcgaaaagcttgggcggcggtttccctatttcgggtgttgtgggccgtgcagaagtcatggatgcaccaaacccaggtggtctaggcggtacttatgcaggtagcccgattgcggttgcagctgcgcatgccgtgattgacgcgattgaagaagagaacctatgcgaccgtgcaaatgaattaggcgctgagttagttgctacgcttaaagatattcagcaaacaactagcgatgtcgtaactgatattcgtgcattgggttcaatggttgcagtagaacttgagactgctgaacaagcaaaagttgtacaaaactatgcaatggaaaacgggttgttacttcttacttgtggtaaatacggtaatgtaattcgtttcttatatccattaaccattcctgctgagcaattccgtcaaggtcttgatatcttgaaacaaggttttgcgacactaaaagcagggagtgcaaaagcaatggagcaatctgcatgattcaaaataatttgcagtatttattaaaacatcctgatatttcattagaagcacctgcatcaaatgattatatcgaggtaaatgatgctgctacgggtgaaactttggcatgggttaaaacctatgaccgtgcaggggttgaagccgcaattaatcgttcagcaaaagcgcaagctgcttggaaaaagcaaactgccttggctcgtgctgatgtgttattggcatggtacaacctcatgcttgagcacaaagaaaacctagctcagattttaacggctgagcaaggtaaaccattggcagaagcacgtggtgaaattggttatgcagcatcattcatccgttggtttgccgagcaagcccgccgtgttgatggtgaagtcttaacacctacgttgccaaaccaacgtctgctcgtgattaaacaagcgattggtgttacagctgcaattacgccgtggaactttccggctgccatgattacgcgtaaagcaggtccagccattgctgcaggttgttcaatgctggttaaaccggcagagcaaacgccgttaaccgcctatgcgcttgaagtattggcgttacaggcaggcttaccagcagatgttttaattaacattagtggtgatgcagttgaagtcggcaaaaccctatgcgaaagcgatattgttcgtaagttaagctttactggttcaacacaagttggccgtatcttgatgcaacaatgtgcgccaaccattaaaaagctttcgcttgaactgggtggtaacgcgcctgtattggtatttgatgatgccaaccttgaacaagcggttcagggcatcatggcaagtaaatatcgtaacagcggtcaaacctgtgtctgtgctaaccgtatttatgttcaagatggcatttacgatgcattggcagagcatttggttgaagctgtgtctaagcttaaagttggcgatggccgtcaagaaggttcaacccaaggacctttaattgatgaagatgcgattgctaaagtgcagtctcatattgcagatgctactgagaaaggcgcaacagttcgtattggtggtcaacgctcggcacttggcggtacattctttgaaccgactgtgttaactggcgtaacgcaagacatgaaagtatctaaagaagaaacttttggtccgcttgccccattgttccgctttaaaactgaagatgaagcagtggcaatggcgaacgataccgagttcggtttagctgcttatttgtttactcaaagcacagctcgtcaatggcgagtaggtgaggcacttgagtacggtatggtcggcattaacacaggcgcgatttcaaacgaagttgctccgtttggtggcgtaaaacaatcaggtctaggtcgtgaaggttcaaaattcggcatcgaagaatatgtcgaaatgaaatacctctgcgtagacttatctgagtaagggataaagcgagttcgctttgttctgaacgaaaacatgcagttatactgcatgtgatgtttcacaaaaaaaccggtcatgcccattcatgaccggtttttttatttaagtcggcaaatatccttcatggctttcgggtaaacgacgaagctcatcaatgagggtttcaatgagtttttcgaccaccagacgttggccttttctagacacataaaccaattgtagcatgccaatattcgacttccagtcaggaagaatatgaaccagtgttcctttacgaatttccgattcaacggttaaaaaaggaagatctgcaatacctaaaccatccattacggcatagtaaacacctgccaagtcattacttttaattcgtggttgataaggaacatcaaccgattcaccattacgaatattgcataaatgccaaatataattttgcttttgtgtgcctaagctaatacttggaaagtcctgtaattcggaataatgcttaatggtgcgaccttgcagtaattcaggcgaagccaccagacagtgatcggttttaatcacatcacgaacaatcaaatttgaatcttcattcggttcaaaattggttcgaatcgcaaggtcgatgtcatcatgcaagatatctactcgacggctggttagctcaagagatatttcaactttagggtaggtttttaaaaactgatttaaaatttttctaatttgaaaatgcatcattaaaggcgggcagcttacttttaccaaaccttgaggctcacttttttgctttaataacacgttctctgcacattcaacttgagcaatgactttgcagcattcctcgtaaaactcttgacctaaatcggtcactttaaaatggcgggttgttctttgaatcaggctgacattaaatttattttcaaggtcaataatgcgtcggctgagcttggatttactaatattttcggcctcactggccgcactaaagccgccgtgttttacgaccaaatagaaataataaaaatcatcaaaagagcttatcaatgtccgttcaacccatttaaatgtaagattagaatgcttaagcattctaatcttggcagtagaacttatttttggctagtgttgtgattgtaacttgaaatcaggttacggtagtcagggatatgatttgagaacaatgtgcctaaaccttcaatatcattacgccagtcacggtgtaattcacacgccataccgaaccaagtcatcagctgagcacctgctttagacatacggtcccaagctgcatcacgtgttaattcgttgaaagtaccagaagcatcagtaatcacgaatacttcaaagccttctgccaaagcagatagtgcagggaatgccacacaaacttcagttacaacacctgcaataatcagttgttttttaccagttgctttaaccgcttttacgaaatcttcattgtcccacgcattgatttggcctggacgtggaataaaaggtgcatctgggtgaatttcttttaactcaggaactaaaggaccgtttggaccagtttcaaaactggttgttaaaattgttggaagattgaagtattttgctgcatttgcaacagcaagtacgttgtttttaaatttatccggatcgatatctcgaactaaagaaagtaaacctgcttgatggtcaaccaaaagaaccgcagcattatccttgtctaagcgtacataatcttgagccattttttatgtcctcatgttatcaaattgaataatcaaaaattattgggtaggtcatcagtgcctaaaatcatgctagatgagtttgttgtcgtaattaagtctaaaaaataggattaagaattttaaaaataggacgatctcttgaacaaaacatcaaaatttatgattgtctcataaatgcaataatgtgttgctaatcctgatctataaactgcaattattgaggcgtaaaatcaatctcagttcaagaaaatcctacatatataggagagatcagatgaagaaatttcttggtgcatatcaaaataaccacatgcattgggttggtgatggtttccctgtatataacctgttctcttatgaccgtttaggccaaaccctaagcccatttttgttactggattatgcagcgccttataacttctcaccaaccaccgaacaacaaggtgtaggttcacatcctcaccgtggcttcgaaacagttactattgcctatcaaggtgaagtgactcataaagactcaagtggtggtggcggaaccattaaaaccggtgacgtgcaatggatgactgcgggtgcaggggtgttacatgaagagttccattctcctgaatttgcagagcatggcggtctttttgaaatggtgcaattgtgggtaaatttaccttcgcattcaaaaatgccccctggaaaatatcaagccattgaagctaaagatattccggacattgtactagacgagcacggtagtcatttgcgtgtgatcgcaggtgaatatgcagatgcaaaaggtgcagcaagtacatttagtccattaaatgtatgggacggtaaattggtaaaaggccaaaaacataccctatatgtacctgaagggcatactacccttgttgttgtgctagagggtgcggttgtggtcaatgatacaaaccgtcttgaaggcaaaactgttgcgattttatctcgtgagggcgttgagtttagcttaaatgctgaagaagacactaaattcttagtgttgactggccaaccactgaatgagccaatcgaaggttatggtccatttgtcatgaataccaaagccgagattatggaagcgattaatgattttaatcgtggaaaattcggttcaatcatgcaagaaggataaattgctaagctgtacttaatgatctttaaaagcaaagtaataaaaagcccgctatcaagtgtgaatagcgggctttttcgctgtaaagtttctgtttttatgatggatatcattattgtgtcggcattgttttgtgtgatttagttctcattattatgccaccatgataccgcaaaaaatgatacttgtaaaacgaatgatataaatacagttaaattatcttattttatttaaaagaatttttttaaatttttaaaaaatatagatttttatacagttatcctcttttgtaaaattttatgaaaaacttttgggcttaccttttaaaatttttctatataaattgatgcaaaaaataaaaatctggtagtttttaatacggtgtttttttagggtatgagtgataatcaaaaaaattctcgaaaaatgggacatcattttggatatcgcaattattggcagtggaatggcaggacttgcagcagcaagaattctgaaagatgcaggacatacaatcacgatatttgaagcacttcctggccggggaatggacagtcatagcattgagttcgatggtgggattattgatgcaccattgcgtgttatgaacccgcatctatggaaaaatacactcagccttgctgcacatttaggcattaaaacttttccggttcgtacctatatgtcttgtagctggttatttgaagatcgtactgaaacatggttaaccacatctcgtagccgtattggtaatttcccaattatcaataaccgtaaaggtatccagcaatatggctggcgtctggtaaaagggatgctgcaattaaaaactgcgattcaccagttctttaaatctaaaaatcaagatattactctcgctgaatttattaatcagaacgatattgaagaagtattctggcatggtgtagttatgccggtgctttatacgatttgtacatgtaacccaaaaacaattggtgattggcctgcgaaaaaccttcttgagtttttgcgtcatttaactgatggtgacatgttgttgcgtatgaaaggcggtacacctgcatttgtagatagcttaattaaaggcattgatatccatagcggttcggcaattaaaaaagttgagctacaaggtgaaaaagtactggtcgaaaatgaaaaaggtgaccaaggtacatttgaccgcgttattgtggcgacgccaacatctaaacttgaagagttcttaaaccctgaacagtttgcagaagatatgaatctgcttaaacagttccgctttgaacaaggcgacttggttattcatacagatgcaacagtaatgccaccacgccgtaaagactggtcagtgctgagctatatgatggaccgtaagtttactcgtcagcagtttacagtttggatgaatgccgttgagccatcactggtaggtaaaaatcctgtattccaaacttggcgtccagtagttgatattgaccctaaaaaagtcatttcaaaagtgaccttaacgcgtgcagttgtagactcgcaaactattgctttaaacaaagagctacaacaacgtcacttagaaccaaaccgtaaagtattctactgtggttcatggtcatgtgatggtttgccaattttagagtcagcagtgacttctgcgatgcatattgctgaaattttgggtgcacctttaccattcgtgggattaaagcctaaggtcgaagttgcccctgaactcggttactaaaattgtgaaagcaaaagttcgagcagctctttctcgatttatccctcataaatatgcaattgatgcatcaagtttgggggatagtgaagagcttgcttggacaaacttgggtttttggaaaaatacccaaacctaccgtgaagcttgtcgccaattggctgatcatttggcacaagctgtcaatttaaattcaaaagatcacttactcgatttaggttgtgggcagggtgcaagtttattgcactggttacagcactatcatcctaaaagccttagtgcagttgaactacaagcttcatgtgttaataaaattcaaaaacttattcctgaaataagccagattttctgcggttcatttttaaatttaaaacaatttgaatttaaacaacgcttcgatgccattttatgtatcgatgcggcttatcacagtcatttaaattcatttctggattcggttacgccagttttaaattcaaaaggacgattaggttttcattacttgatgcgtgccgactcatgtcacaacatgaccatgctacaagaacaaaagcatcgttatttacttaaagcagccgatgtcacttggaataccttactcacggaagagatactgagaactaccttggaacaacaaggttttacagatattcaaatcgaagatttatcagaacaggtattattaggtttttcacagtatattcaaaatcaacaagcacaaagccataaccgagggttggcaaattttaaaatccaaatgactgcaaagttatgccaacaactctatcaaaatgggtatgtacgttatattcaaataacagcaataaaaaaatagggtgagccatgtcagttaaatatcaaggatcatgtttatgtggagctgtgagctatcaaagtgatgcagagccacgttatagttttaattgccattgtcgagattgccaaaaggcaacaggttcggcctatgcgccaatcgctttttttcatcaatctgaattgaaaataagtggcgaacttaaatattttgagactttaggttcatctggtcgccccattaaaagagccttttgcccgacttgtggttctcaactttttggcttacctgaacttgttcctgaaatgatttcaatacgcgcaggcactttagatgacccaagtctctatcatcctaaagcggaggtttttgtgagtcagacctatgcttgggacatgctgaatccaaaccttaaacactttgaaaaaatgatagagaagagcaagaaataaggcttaattaaagaagccaaatattgccaaagcacagattaaagtaagactgccaagagctaaaaataatatggtttttctaaattttagctgaggcattttacttacaaggataataaggcatgcaagtatgatcactaaagattgaaaaaggtttaaaggtagattagacatctcgttccttgttgtttttaaatttattttagaaataaagtaataaactcattatatctttttcttatttaattgaagaacagaacttgtttataaattcatattttttatttcatgatgggtaaatcaagttttaaatttaaaagaaccatgtacgctttttcctacatccattcaggaaattgacgtctttctatgacctcatgaattgcctatgatgaactcatcaggaacaggaagttccaaaacgtaaaacaacaataataagtttaagcaccaggacgtgaggtattacaggatgtatgcctagtaacgaaatacgaaaaaagcccaacaggatgttgggcttttttcatttcttattaacgaatttctttaccacctaaggcagcacagtcaaaaggtctattccaaaacctacagacaacaaaaaaccccataaatcaaatattcatgaggtttaatgatggtgccggcacacggattcgaactgtggacctactgattacaagtcagttgctctaccaactgagctatgccggcgatgtggagtgaattttacagtttcttaaaaaaaatacaagccaaaaaatgagcatttaaattttttcatatgatttttaaatactcatcgggtttagcctaaaaaagttagggttttactatattaatgtgctttggcatgtgaagtataaaccgctaaaaatattccaattaaagacaagaccacggttaaaccgacaatcgcactccagccaccgtgtaaccagaaccaaccgcccgccgagccgacaatacttgaacccatatagtaaaacagcaagtaaagcgaactggcatgagctttagcttgtttgctttcggcacccacagaactactcgtaagtgagtgggtaataaagaagcctgtggtaataaatgcgatgccaataataatgccgaaaagagaagtgaggagggtcatgagactacccacgatcataagcgcaaagccactcatcatcatggttttcttgccgaagcgatcggctaagctacctgccaacgatgaagacaccataccaaagctatacgacaagaaaataaggctaatttgtgtttgactcagtgaataaggtgcgccgcttaagcggaaggttgcatagttaaacaaggtcacgaacacactggtaagcaagaaaccaatggcaaacaggcgtaataatttagtattgcttaaatgagcacgccacatttgcatgtgaaagcctaaattcagcccttttttctgcacaaaattacgcgaagtaggcagtagttttaaaaatgcaattgagcaaataaaacagattgctccaagtaggcctaaggcggtgcgccatgaaaaatattcaaccaaaatacccataccgacacggcccatcatgccaccaaaggctgtccctgcaatatataaacccatggttttaccgaggtgttcaggtgcaatttcttcggcaatccaagccatagtcactgcgggtacgccaccaagcagtaaaccttctaacgcacgtgctatgagtaaactgtgccagttcggtgtaaacatcgagacaatatttaaaattgcggcacacagcattgacgcaaagatcacgccgcgacggccaatcgcttgtgaaaaggcactcgatagcacaatcgaaatggctaaaaaggcagtcgttaatgacagtgccaaagagctactcgcaggactaatctgaaagctttggctaaatgcaggtaagagtggctgtacacaataaattagagagaagctagcaaaacctacgaggaataaagcaaatcctgcatgtttataagctttagtccctttgtgaatccactcacgggaaagaacagacgttgcctcagtgtttaaggtactgggtgtagatgaagagttcatatcatgaccatgacagaaaaaagagcagtgcctaaaggcatgctgaatcgagaaaattcgataaattaaaattagcaatttagaaggtatttttctaatatatttaataatgggacacgatatgttttatatataacaatggaactcaggcatatacgctactttttggcagtagcagaagaaaaaaactttaccaaagctgcgcagcgcttaaacatgagtcagccgcctttaagcatgcaaatacgagacttagaagaagaactcggtgcagatttatttattcgttcgcctcatggggtggagctgaccgaagctgggcttgcctttttaaatgcaattcagccagtacagcagcgtgtagaagatgcagcaaaccttgttaaacaagtggcaaatggcgaagtgggtcaattacggttaggctttacaggtacttcaatgttgaaccctttaattcctaaatgcgttcgctatttccagcagcaatacccgaaagtaaatttaaagcttgaagaagccaatactttactactcatcgatttattacttgaagaccgtttagatgtcgcaattattcgttcgccacgcaatatgccggacagtcttatacttcaagaattattagctgagccgctcattgctgctttaccttccgagtcttttcaactcgacgatgcatcacacgaaattgatttaactgcgctgcgagagcttgattttattgtctcgccaccttcagtgagtgcagggctttttgatgcgattaaacaggcctgccatgagcgtggctttgaaccgaaaattggacaaaacgccccgcaaattgtgtcaattttatcgttggtgtctgcaaacttaggggtgtctttggttcccgagtcgaccaaacaattgcaaatacaaggtgtggcttatcggtctttgaaagcacctgtccctacggtgggtttagggcttgcttataagaaacatgccccttcacaaatggcgattaactttgccagtgtggtgcaagtggcttgccaccacgccaacgaaataaatgaaatcggctagtttgatttcggcgctctgttcattaaaaagatgcctgaaataataaaaatcgcaccatataaaaacgataaagttggctgttcatgaataaaaacccaagccataagcgctgcaaaaataggttctgaaagctcggtcacttgtacctttgcggcactcatataagacaacgctttggtggtacagaaaaagccgagtatggtcggtagaacagctaaaccaatcaaacctaaaatgatgtcactattaaaattaatgctgtgcaagtttactaaaaacggaactgcaagataaacactaccaaacagcagtaagtatttagtcagaaacagcccgccatttaatttgaactttttcactaaaaccgaaaataagccataacccgtaccggcaatagaggcattaatcagcattaaaaggctattttcacctttccacgaaataatgctaatcccagcaaccgccaataatgttccaataagcgaatgaatgtagatactttcttttaaaatgaatcgaccaaaaaatagggcagagatggcagccgaagccatgagtaccactaccacattggccgcagcgccgtggttataggcaatagtctcaaaaaagaatagcgagaaaattcctaaaaaagcacatatggcaatttgagcaaaaacgctgagtttacttggcgtgctgctaataaaagcaatcttttggctaacaggcactttaaataaaaacacacttaaaaagaaaaaggcgataatggtttttaaaaaggcaatgtcttgcgggtttaaaccactgtgcatgagtaatttactaattacaccaatagatgcatttaaagccgctgcacacagtgcaaatagggttccaataattaaattattcactcttataatttttcctaatttttacgcatgcagtctacattattttttggttgaatattcaattaaaataaccggttaaggttcaatattttcaaaaatttattttgtatggatttaactatttttataaaaacctaaactcttgtaatagacttttgtttcaaataattgtgatttatcgcgccagctcatattatataattagttaattattaaagaattttaaaaatgattaaatcgattattacaggctgcgcggttcttacactttcggctttggcggtgacccatgcagaattttcttatgaacaagaattacaacaaggctgtaataaagtgaagcaatacgcgagcttaggtaagaaattctacgatcaaaaacaatataaaaaagcgctcgaaaatttccagaaccaagcctcttggactgctttttgtaaagccaatgcagacgaaaccacagttaaatttaccgaccgtgatattgaagttgccaacaataacgtgggcttagcctatgccaaattgggtcagccactttgggcaagagcatggtttatgcttgatgaaaaatcaaagtctagtcaatttaaccttaagcagttgcctgcccctaaagcatcaaatgatttgtcgggtgagtacgtccgttactcaggttttggtgagtgggatcacatcacggtaagccgtaaacagggccaatatgccattggctattcgggcgtttatatgggacttagaagcttaatttatggcccaaatatgggtgattttggcactacaatgccgactaatgccaagcaaaccatttataaagatcaagattgccgtattcagctcgattttagaaccaatgcgaagttaggcaattatattcaggtcaaacaaaacgaaggtgagtcgggttgtggctttggacataacgtttatgccgatggaacgtatttaaaagttgagtctggaaaataagattaaacatataggaacacaataatgaaaaatatatttgcacctttactgcttgtttctacagttattttttctgctcacatttatgcagagccgactagtacctgtaaggaagtgaaattccaaaagactgatcaggcttggagtgggcactattatttacatggtgtaatggaagtcggttcagagcttttacttcagccagacggtaagtttcaatggatgcttgctgtaggtgcgttagaccaatatgccgaaggcacatggtggaaaaacggtgactgtattggcttaaaaccagaggctaaatttaaaaaggatttaagtattttccctgaaagcctaacgatttcggataaatccttagatgcaatctgggaaggtggacgccagcaaggcacatatagcaaagactaaataaaaaagtccgacactgagtcggactttttttatgggttgtattttagtgattcaccgcagcaagttgctgagcgttatagcgtgcgcccatgtttgggtatctcgcgataatcgcatcgatttctgccaaatctgccgctgttaaatgaaggtctacagcacccgcattttccacaagtcgctcgattttacgcgtacccggaattggaataatgtcatcaccttgcgccaaaatccaagccaaagccagttgagtggctgtcgcatttttgctttgagcaaattcactaaatgcttgcgccaagctttggttatttttccagttatcgccttggtagcgtggtaactggcgacggaaatcattttcgtctaagttatttacatcaagcgtattggtgattagaccacgcgataacggagaatatggcacaaggctaatacctaactcacgaatggtttgcaaatgggtttgctcaaactcacgggtaagtagcgaatattcatgttgaaccgctgcaatcgggtgaatcgaatgtgctttacgaatggtttcagccgaagcttcactgagtcctaaataacgaactttaccttgtttgaccaagtcagccattgcgccaatggtatcttcaaccggaacatttgggtctatgcggtgtgcataatacaaatcaatcacgtctgtatttaagcgtcttaagctgttttcgaccgcgactttaatccactcaggtgagccgtcgatataagactctaaagaatttttcgggttgaggttatcttctttatagcggaagccaaatttggtcgccaagaacactttgtcacgatgtttttctaaaacttttgagagcaaaacttcatttgcaccgttgccatacatgtcggcagtgtcccaaaagttaatgccgaggtctaaggccttttctagagttgcaatgctttgtgtgtcgtctgaggcaccataggcaaagctcattcccatgcaacctaaaccaagtgctgatactttttcgcctgtttgtcctaaagttctatatttcatttttcacactctttttgcaaaatcacttgagtagaaaaactataaaatgctttggctcaaactgacgtataacattcaaaccaataattataaaattcaaacaatctgtttttaggctacacagtcttcgcggaattttttaggcgaaaaaccggtatttttcttaaagaaattggtgaaatacgctgaatattcaaagcctaagctataagcaatttcggaaatattccaactggtgtgttgtagcagcgctttggcttcttgcgtaatacgcgagctaatatgctcagacgtagttttacctgtggcttcttttacagctcggtttaaatggttcacatgtaccgacaagccataggcatagtcatttgcagttttgagtttaagctgaaaatggggcgagtcgattgggaactggcgctctaataactcaaagaacaaatggcaaatgcgtaccgaagcattactatgtttttcaaactgttgggtcggttgcattttcatggcttcatgcacaatcagatgcaaataatttcttaaaacattgtatttatgaatatagtctgaatttatttcattcatcatctttttgaaaataaatgaaatttcttcaacctgttggtcgtttaaaaaatatagtgggtcgccgtcaactttaaatagcggtgagtcttttaaaaagctttgtcgcgattcttggtttacaaactcttcggtaaatagacaaaaccagcctgcctgttcgggcgaattaatttcccatgcgtagggaaccatcgggtttgaaaacagtaaagcagggcggtcgactcgtatccagcggttggcgtagtgaagttcgcctgtgcctaaaaccagtgaaattttataataatcgcggcggctataaggagtgagaaacgagcaggcatcgcgttggaacacgttgaaatggccaaacgacgtcgatggaaccgagtaatcgctatctctggttaaagaaaagcggcgataaaaatcatgtatggtttccatgtctttgcctgcatgcattatcaatttatttaaagttataaaattcaaactttatttactgtagcttttatttatagcgcgatcaatctgttcatttaaacaggtttgaaaatgaatgataaattaacaatgagaaaaatgagccaatagaaataaaaatattttataaattaataatatatgaacattgacacttaaaaacttgataattattctttgtctgcaaccgattctgcggtagaacgaaaaggggacactttcgggtgtgctggtactgtacccagcctgctaaccccttttcgttttgccatcattttacgatagagcgaaaagggtgacaccttcgggtgtattgggttttcctttgtgtaccatctgctaaccccttttcgttctgtcaccattctacggtagagtgataagaggatactttcaagtgtgctggttctgtatggccagtctgctaacctcttttcgttctgccaccaattttactattatgatgatatcgttaaatttaaattaaaggtccttttagcttaaatatctaattgaataaacaacaataattatttaaccaatttctattcaaccttacattgacacccaaaaacacgcggattatcctttgcctgctggccacattgctagtcgattttgacagatcgatataacacacaagacatcaaaaagttctctttttggtggcgaactcgttcgtcccccttcgtagcggtagggcgagggagggacgccttgtgcgtgctgattcttgtgtgtcagtctgtcaaccttctctcgttctaccaccatcatttgacagtgatcgggtagaactcctttacacacaaggagtccgcacatgcgtactatttcaactctttcattggcaaccttcgccaaaatctttgactctatacccaactggtctttaaaacggtttaaccgactctaggacttaagccataggtcattacgactaaaaaatcatagcaacaataaaatccgagataggcaagcacaccatttttgtgcggcttttgcacgcctgtttttagcgctcaatttaagagcggcggcatttctatctcttttatttacaacaaaaaattattttaaatgatatacatgaaaaatttagaagcttcatttagagcattgcaagtgctccacacggcaaaagatttatttaaccaatatgggtttcataaggtaggggtagaccgaattattgccgactcccaaattcccaaagctaccttttacaactacttccattcaaaagaaagactcattcagatgagcttaacttttcaaacagacgctttaaaagaagaggtattttctacgatctattcataccgtgaactgatggtgttcgataaacttaagagaattttctttttacatgctgactcagacgggctttatcgtttgccttttaaagcaatttttgaaatagaaaagtattatccgtcggcttataaagtggttattgattaccgaaactggcttattcaggaaattcataaactgcttttaaccgtaaaacctgccgctacagttgaagatgcgcatatgtttttgtttgtggtcgatggcgcaatggtgcagcttttaagctcaaatcaaactgatgaaagggaatatctgattgattattttctaagtcgggtttgatggggggggccgacgggagttgggctttagtgtaattaaaaagaaatttataagttttaaatagcaaacagattaaagataaatattttcgccatacgggaggttattatttaattcattaaatttaaatagctctcatctattattgtttgattataaaggttagaaaaaactatttaaggttagacatgaataacttcaaaattcttttcattactataggactaatgttttcaatgagtttatttgctaatccaattttctcagatgacctattaaagagagctacaaatggtgatacatcagctcaactagagttagcagatgtttatatatatggatggggtatcgaagagaatgaaactcaagcggaattctgggcaactaaatcagccgaaagcggtaatgtaaaagcaatgcaatggctcggtgagggatatgccacttatgctggtcttgttggagatatggatccagctgatgcagatgaacactacaaaaaagcttttaagtggttttcgaaaggaactcaactaaatgatgcagattgtatggttggtttggctaacttgtatagtagcggtgacggagttgagcaagatactcataaagcactagaactacgtaaaaaggctgctgctcttggaaataaacaagctatgagggatattgcctttatgtatgaatatggattgggtgtagagaaaaatttagagattgcaaaatattggagtgagaaaggaaagatttaatagatttatattttatatcgagttctattttatttgagaatggaaagacctaaatctctagttttaggtctttaaaaaggaaagtttctaatgaagcataaattaataattattttttcaattatttttgtacttataggttgtggggaagaaatataaaatttctcctgagagtttacctgttgctcatattaatcaagaataccaacaaattattaagatttctggaggaaaagttatagataaatacgctgaattagaaacgaatattccagaaaatctaggcattaccgttaagcctgttgatgacttggatggatataatattatacaaatcaaaggtgttccaaagtacaaaggaaaatatactatccatatacgagctgacttctatgcaggtggtgatgctgaaattgacaagacatatagctttattgtccaagattaaaaattatcgcagagtcgggaaatagcaaagtagagaagttagtaatgacggtaaaatttagacaatatttcttaattttaatttttggattattactttccgcttgtcagccagccgcacaacataatgaaagtttagattcccatcagcaagcctacactttgcatatgggtgaaaaaggtattcaagatttttcaaaatatagtgatagcaatgtcgataattatccagctggcgttagctttagagaacttcaattttctcctcctaacttaggaaaaataactatagagaatggttctaacactttatcgattgaacatgttttctctgttttaggaactcaatatgataaaaatgaagggatccaagttttagatattgatgctggcctcacaaaagaagaatttgctaccccagagcaggtttatcaaagctatgtagctttaatgaaacgtattaatcaggctggttggaaaaactatttctttacagatgctccgcgtattgctaaagaagataatattaagcatctatcgaaaagtcgtgatgtcattgatcctagttatatttttagctttgaggagtggaaaaatataataaacaacagcccaacaaaatcattgggttatagattgtacgctaatgggattattttagatatcagtttaaaaagaacagctaagaataagtgtaatgaagagcaatatatgcttagatttagctttcagagtgttcgatacaatgaaagagactcaattcctgactctgataaaatgacacctagtgaattcgagcaagcgtttaaaaagagattaattgaaaataaaaaatatcgggaaaaggaggagggaaaagctaaggctgagggctatcatatcgatgaaaaatatacagatcctgatgtttggccatatgttaaatagaagtttttaaaataataaaaaggcttaatttacttaaatttaagccttttaaataattctatttttagctttcactcaaaatcaattgtttaatcttcacagctttctcgaagtggtctagcttatgctccataatccatcaatgcgctgcttccataagtagctcagggttatcattcttatttttaaaaaaggcataaaaagatagaccgacattgtctcccttcttttcaattttctcgtcgcatcccttaataaaaatttcttttaattcatgtctcatattgagtatcactttcagcctataaaactaagagttcatattccgctcgccccattggcacatcatatctaataaaggaattaaagactgtcctctttctgaaagacgatactcaacttttggcggaatttgaggatattccttacgaataataagttcgtctctttctaactctttaagtgtattgctcagcgttctaaatgaaatattgccaatacagcgctgcaactcattaaaacgcataacggtttttccatacagccaatacatgatgatcatcttatatttgccattaattaaagaaagagtgtagccaaaacctgtttcttctaatggcgtatttgatggaaggcagtcagtcatttttaaaatctacactatcttttagtatagtatataacaaaaattaccgtacttatatttaggaaagcacacttctataatcgatttatctacttttcgataagagtgtttttataatgaaaaagacattagtgatcgttgcacatcctcacatagaccagtctgtaattaataaaagatgggtagaggagttagaaaaatatcccgaccaatttaccgttcaccagatttatcaagcctacccagatggcgtaattgatgttgccaaagaacaagcgcttgtagaagaacacgaaaatttagtttttcaatttccagtgtattggtttaactgtccaccacttttgaaacaatggcttgatgaagttttggcgtatggttgggcttatggttcaacaggtgacaagcttaaaaataaaaaatttatgttggcggtgtctgcaggtgctcaagaaaaagtttattcagagcaaggtgaatataagctttcgttagagcagatttttagttcttttgaacttactgctttatatgttggggcagtctatcaaccgctttatgcattttatggtttagacacaaacccttcaccagatgatgctattccaactcaccaagaaatagataacagtgccgttcagtatgttcagaaattattagcgttgtctgaataaatttaaagatagaaaggcctaagcgtgagggtttgggtctttccttacaaataaatagtttcagtgtaagatatctttatgatttaaataattattattttttcaattaagcgacaagggaaatttagaggagtaaaattacagcttcacttatagattactaaaaattcagttatgttcagttcagatttaacagattatgtcattcgacaattaggtcggactaaaaataaacgttatgaagcatatgtagttagtcgaattattcatttacttaacgactttactttaaaatttgtcactcaacagtttgttagattatcaaataagaaaattgctttaactgatttctctgtacacgataaaaatagataactcattgaaataatgtcataataattgttttctaacgacgaatactatgacacatctcaatgagttatatcttatcttaaacaaatatctaaaatggaacaagtcacatttaaagtgctttgcgctcatcatgcttgtgattattttaaagcaaacatgtaatctttcttctgcatctaaagccttgcccatcaagtgcttaccacaatcattttatcgacgtatgcagcgcttctttgcaggtcagtattttgattatcgtcaaatttctcagttgattttcaatatgttttcattcgaccaagtgcaactgactttagatagaaccaattggaaatggggaaaacgaaatattaatatcctgatgctcgcaatcgtttatcgtggaatagcgatacctatcctttggacattgcttaataaacgtggaaattcagatacgaaagagcgtattgctttgattcaacgctttatagccatttttggtaaagaccgtattgtgaatgtgttcgcagacagagagtttatcggtgagcagtggtttacatggttaattgaacaagacatcaacttctgcattcgtgttaaaaaaacttcattgtcaccaatcatttaggaaagaatcataaaattagtgatttatttcgccatcttaaagttggtcaaattgaatgtcgtaaacgacggattttggttggtcgggtgaaactatatataagtgcactacagttagaaaatggagagcttttactcgtcgtttctcctcagtttaatgccaatgctattcaggattatgcattacgctgggaaattgaaaccttattcagttgtctcaaaggacgcgggtttaatcttgaaaatacgcgcttgacagaccctagacgagtgaaaaaattgattgcggtgttagctataagcttctgttggtgttacttaacgggtgaatggcaacatgatcaaaaaaaagcgataaaaataaagaagcatggacgactctcaatgagtttatttcgctatggtttagactatgttcaaatggcgattcagcgtttaattggttttgggaaaaaagaagagtttaaggaaattttggcaattttaagaaggcagaaccctgataggataagggttctgtgaaatttgtcgtgtacagagaactgatttatattttcctcaacttggtattcatattgaagttgatgaagggcatcactttttaagaaatagtaaaatggagtattcactcaaccaaatagatgagcctctttatagtatctctcaaacagaaagtgacgctatgagagaagaagatattattagtattactggacataaaatttttcgggtaaatgtttataaaaatcaggaaggtcaacctcaaaatttagagagtatccatcaacaaattgataaaattatagaagaaataaagactgcaaagaataagctaatagaggcttctacatttaaagaatggaatatagaaacagaatataaccctcaaacttatattaatttaggacgcatcagcctagctgacaatgtagtattaaaaacaacaaaagatgtctgtaattgctttggttataactataaaaattatcagagaggaggggctattcatccgtatgaagaagataccttaatttggtttcctagactttatgaaaataaggattggataaatactatatcgcctgatggcttaacaattactgaaaagtcgacagatgaaactattacacttaaaaaattagaagagtggaaaaatggcccacagaaaagaattgtctttgcaagagttaaggataatttgaatagtcgagctatgtatcgttttatgggtttgtataagtttcaaaaagcggatttaaaggatggagcggtatggaaacgggtggaatgtgaagtccaaacgtattctcccaaggaaaccaaatgctaaagcctagaatctttataactatcggattacttcttgctggattaactttatttgcagtccttgaggcatacgagaaaaagactaacgttgaaaaagaacaggcaagtcgagttgctattttcttttttaattcactttctaatggagactcagctacagcatacaaatatgtttggtcaggcgagaacttaaatattcgaaatgctgaaataccccaaatttataaagactcaaaagttctagaagtgctaaaagttcgttacgactcggcaaaaaatagacctgattactatcaacaattttataaaatgatttcacttaccataaagataaaaacagtacatgcagatcttgctggtaaccctgcgggaacctatattgtgtttgtaactgttgtaaaaaaagatccaaaatctaattggctcgttactgagctgggcagtggagcttaattggaataataaaatatttagccaataaaaaagacctaaatcaaaacgattaggtcttttttgaattctggcggtgagagagggattcgaaccctcgatacgcgtaaacgtatacacactttccaggcgtgctccttcagccactcggacacctcaccaaggcgtgcgatagtaactaaaaaaacgagtcctgccaagatttaagacgagctttacagaaaaaaaataatagaggtgataagattgcgctaaaaatcatattggtttaattacacaatgcaaaatacggccaaaaaagcgaccttgcctgccacggctttggcagctcttggagtggtctttggagacatcggaacaagtccgctctatgccttgaaagagtccttccatgcagcgcatgggttgggaattcagcctgaaaacgtattaggaattttatccattattttttggtgcttaatgctgattattagcatcaagtatgtcgcaatcgtgatgcgtgcagacaacaatggcgaaggcggcatcatggccttactcgctttgaatttgcgtaaagcgaaaattgccgacaacaaaaaaatctacatgattgcgataggctttataggggcatcactgttctttggtgacggtattattaccccagccatttcagtattgtctgcagtcgaagggttgtctattgcaaccgatgtgtttgacccgttcattatgcctattgcaattgccattatcgtcacgctgttttttggtgcaaaagcacggtacggcgtttgtaggtaagttttttggtccaattacgcttgtgtggttcttatcgttaggaatcttgggcattcacagtgttatccaaacacctgtggtactaggcatgtttagtccgcattgggcgatccagtttatctatcaccatccgatcatgacattttttgtgatgggtgctgtggtgttaacagtgactggtggtgaagcactgtatgccgatatgggacatttcggaccagttccgattcgtctggcgtggttctttgtggtattgccatgcttggttttaaactacgcaggacagggcgcattattactcagagacccagcggcaattgaaaacccattctatttactggtgccgcagtgggccttgtacccaatgattatcatggcaaccatggcaacagtcattgcctctcaagctgtaatttctggggtgttttctcttgcgcgccaagcgattcaattgggttatttaccacgtttaagtattaagcatacgtctgagtccgaagaaggtcagatttatgtacctttcttaaactggttacttttaatcgcaattattatcttaattttaatcttcaaaactagctcgaacttggcaagtgcatacggtttggccgtaactttgaccatgctctgtgacacgattttggttgctgtatttatctactcggcgtggaagtggagcctgccaaaagtgcttctcctgattattccgttctttattttagagtcggtattggtcggtgcaacttcacttaaaatcttgtctggcggttgggtgccattactgattggtgcgattgcagtgaccattttaatgacatggaaacgtggccgtgagcttacttttgctaagctggaacacgatactttgtcactcgatctgtttgtaaaaagtattggtaatagtgtgcactgggtgccaggcgatgctgtatttatgacaggtacgccaaatgttgtgccacatgccatgctgcataatattaagcacaacaaggtactacatcagcgtaatatcttggtcactgtagtgattgaagatgtaccgtttgttgcacctgaagagcgtattacgacagaaaccttagccgaacatttcttccgtattaaaattttctacggctttaaagatgaaatgaatgtgccgaaagcattgatgcaagcctatgaacaattaggccttgaatatgacttgatgcatatcagcttctttatttcgcgtgatcgtattgttcactcggtgggagacggcatgtcgccatggagagaaaagctgtttatttcaatgcagcgtaataccagcccggtcagtgatttctatcaaattccaaccaaccgtgtggttgaattaggtagtcaaatcgaaatataaaatttgatgtaataaaaaaaccaagacatatgtcttggtttttttatggctcggattattgagcttgtggcataggtgcatctgctggtaacgccccatcttttaccattgggtctgctgattggttcgggttagcagctggcggtggagtgttcggatcttgtggcgctggagccgcttgattcggtgcaggtggcactgcatcagttggtgcagctggaggagccatttcaccgcccgctggaggtgctggtggaacatctgccggaataggagcaccggtaggcgctgcgcttgttggtgcagcagaaacttgctgtacttgtccgctattgaccaaatcgctaatagaacctggttggccgttgacggttgtagtcacttttactttagataagctttctaaagtatcacctggctggactgctggttcagccaaagcagccatactacacaatcctgtgattacgccaataccaataatctttgaatggatcattaaatggactccgattatatttttatccaaatttgtggagctaaccatgtcataagccataagtgcatttcaacgaaagatacgcaattggcgcaattcaatagccaaaggctctcataatgccaacagactgttacgtaaaaccgattagagttacaaaaaagatgaccacgttttaaccatttgaaagataagcgatatacttaaaaaagcaggattgttaagctgcgtgtggacagtggtattgatagaaacatggcaagtaaaaaacgtagtaaaggtacaaattcattttctctaagtgagcattttggcaagattattcttgcttgtattgcagctggaagctttgcaattgctttcggcagtgaaaagatttcgcagtggttttcgcctttaagtactaactcgacttgtcttaaccagttttatcgtgaagttccgcctgctttaaataaagaaagcttaaaaaaagacagctatccgctgtgctttaacggttttaatgttctttattcaggcatttctaaaacaccattatggtcggccgagcatttagatgcagaacgtttaagtgtcaaaattaaacgtgaagataacttccatgaagaaacgcgtgttcctcaaaagcatcgggcacttttaagtgactaccgtggttcagggtatgaccgtggtcatatggcaccgaatggcgatatgccaaataaagaatcacagtctgatagtttctcgctcagcaacatggtgccgcaagcgcctaaaaataaccaagaagtctggcgtaaacttgaagaagcaacccgtgctattgtcaccaagcaaaaacaagatgtatatgtcgtgacaggacctgtttttgagggtaaacgtctcaaaacgattgggcagggtgtgattgtacctaccgcagtttataaagcggtgtatatgccaaaaactggcgctattggggcttattacgcacctaacaataactcgcagcaagtgaaggtagtgagtgtttgttatatagaagaaaagcttggtattaacttatttccacaacttacagaacagcaaaaacgtaacgtttatcgcttaccgttaactgctagccaagttaaacctaaccaaaagctcgactatttgcattgggatggtgaaagccagtgcgaacaagacctaagcgcagaacaaattcaagcgttacaagaccaatttaaaaagcaaaaaactggctcttctgaaccgatggaagcaaaagttccaagtattgatgaagaaactagaaatgccattgtgaaacaattggttgaagccttggtgaactatttcttgcagataatgaaataagccccttctagcactgttgtgaagcctgaatcgatacaataagatgaatagacagatctgtctgttcatctgtttattcgaataaggataataataatgtttgcctcgatgtttcttttttcctttgcaatgtcgattacacccggtcccgtcaatacagtcattttatcgaccagcttaaatcatggtttaaaaagatcacttccctatatttcaggtgccaccattggctttaccttgcttttgatttttatggcctttggccttcaaagtgtattaactcagtttccagttgtcttaaaaattcttgcagtttgtggaacgctctttgtttgctatatcggcataaaaattattctttctgctgccaatatttcaatttcaagtgcacctgtagagcacatgcttattcccaattttaaagatggtttcttattacagtggcttaacccaaaagcgtggttggcttgtgtgtcgggcattaccatgtttacgagcattgaaaacccgcagtcgttgccgatctttattattatttatttcttcacctgctatgcctgcttgttcttttggggactatgtggcgataaattttcagtggtactgaatcagggcaaccgtttgaaatattttaatatcctgatgggcgctttcttaattttgtcggctcttttaattttgattgattttttttaaattggtcgtattacactgtgaagatataacaacgagacaacagctatgtttaagccatttgaaaagggtactgaatcttcttcaattgaagatttaacattagaaaatgatgtcgaatgcgtgagcatttatggcaatttgcaaatcactaaagacaaagtcgggttagagcaggcaaaggcattgcagagttttttaaacgatataattgcagctttggaaaaagaagaattgcctgagaaaattgaacgtccggctgaacaagaaattaataatccgtttttgtaataaatatattttactcaatttgctatcgcgacggcggcacggaggccgcctgtttcactgcgttacatggaggtaacgtcagtgaaacgaatgagttttgtcacttttgctcactcaaaagtgaggcattacctatataactacaacttgagtgaccgtggtgtttgcggttgtgcagttaatccttatccccagcaaccaccttataaataattgccccaatcacagcccctaaaatcggtgctacccagaacaaccacaactgacttaaagcagccgtttcagcaaagaacgcaacacctgtactacgtgcagggtttaccgaagtatttgtcaccggaatactgattaagtgaatgagtgttaagcccaaaccaattgcaataggagcgaagccagcaggtgcacggcggtcagttgctcctaaaataatgattaagaagaaagcagtaagaaccacttcaataatgaaagcagaacctaaaccaaatttatttggtgataagtcaccaaaaccattggttgcaaacccgccaacaccactaaagcctgcttggccttgagcaataatataaagaacaaatgcagcagcagtcgcaccaaccacttgcgcaacaatatacggaattaaatctttaacatcgaagcggccaccgacccaaaggccaacacttaccgcgggattgaaatgtccacctgagatatgccctagagcataagcacctgtgagtacggttaaaccaaaggcaagggctacacctgcaaagccaataccaagttcagggaaagctgcggctaaaactgcgctaccacaaccaccaaagactagccaaaacgtacctaggaattcagcaaaatatttattcattgtgattactcatctattgatctattttttaattaatgtgaaatacgtcacaaaaaattaagcatgtgactatatgaaatttttgttttcagtgttgttttaatcaagaaaagatttgtaagttttggttggttattctttgtttaaaaattgatctctccactgttgtggggtttgcttggtccaatgcttaaatgctctttgaaatgcgctttgttctgaataacaaagtaaaagtgcaatctcttgtaggctcaaatgcgggtcttttaaatattcggttgccaacataaagcgtacttgctgaacacgttcctgaaaggtggtgttctgctgttgtaagtgcctttggagttgacgaaccgataggcctaattgagctgcaatatattcaatttgatactgattcttttgcagaccagtcaaaattgaatgctgcaaacgctgatcgagttgggttgaattgggtaactgttctaaaagtgcttgggcctgctgaaccaatagttgctgtaatgtgtggtctgcgctgctaagcggcttgtgaatttcggtaatgggtataaataactctgtacggggctggctaaaacgaacgggacattgaaagtactgctcgtaaactctgatatttttaggggctgcatttaaaaagcgcacttcatataactgtacatcttcgtgagacataaaaagacgtaagaactgaatcaccagtgcaatcgcgatttcatcggtaagctgggtagggtgtagctcagtcgcttcccagcgaatagaaccatatctcccttgtagctcaaccactaatgggctcccgtcataaattagacggtgaaagtcatggtaacgaattaaggcttcacctaagttatcgcaagagagagcaaggtaggcaataatgcctaaatgtttgggttgtacatatttggcaatttctagccctaaccccggctttgggtccagtttataaataacttctaataggtcacgccaaaccacatagtcaaagcgttccagattttggatttgttctaattgttcaggaatagttaactcattggcttcgcaataagcctttaataagtgccccagtcctccatataccgagcctgtataattttttagttgtggcatccctaaccacctcttttttgtcgtgatttgtcaatgaaaccataaattctggtcaatacctagcataacgaattttatatgctgaataaaaagaaaaaggagttaggtgatgttaaaagggtttattgccggaattgcagttgcgaatgcatttgaatgggtagcacacaaatatattttgcatggtgtacaccgtgccggacaaccgcgctatagcccagtgccgaaaagtatggagtcgcattgggcacaccatcgtgaagtccgtaaacaacagtttcatgatgattgttatgttgagggcgttggaaactggcgaaccaaaaatgagttaatttcacttgccgtggtggcaaccgtttcaagtgcaattttctaccccttttcaaaaggtatggcacttgcagcttggtacagtgctggtaattattattatattcatcgccgtgcacatttagagcctgactgggcaaagcgtaaaattccgtggcattacgaccaccatatgaactctaaccaagatgccaattggtgtgtgaccaaaccttggtttgactatgtgatgggaacacgtgtggtgtcttcggcagatttaaaagaacaaaatcctttggggatacggttacctactgcgcttgctaggccactctctcaagctgtagaaaaaatctttccagcaaaatgggtcgagaaaaaagcacagcctaaactcgttagtgatgtaaatgcgatagaaggtgctgcataaaaaattaaaggggcatcttgcccctttaaatataaataaacttacaagcgcatttcgataccttgttcagccaaatattgtttagcttctggaatcgtatattggccaaagtggaaaatacttgctgccaatacggcatctgcaccaccttgtaaaataccgtctgcaaggtgttgtaagttacctacaccgcctgaggcaatcgttgggatggtaacgcggtcattaatagcacgcattaacgcaatgtcataacctgctttagtaccatcggcatccatactggtaatgagtaactcaccggcaccgtagtcagccatttttacagcccattcaatggcatcaatacccgttggtttacggccaccgtgagtaaagatttcccatttgttgtcaccagtttttttggcatcaatcgcaaccacaatacattgtgcgccaaaatgctgagaggcttcttgaacaaattcagggttaaatacggcagccgagttaatactcactttatctgcacctgcatttaataacgcacgaatatcttcaaccttacgtacaccaccaccgacagttaaaggcacgaatacagtctcggccatacgttcaacagtacggtaagtggtatcgcggccatgatgtgtagcggtaatgtctaagaaagtaatttcgtctgcaccttgttcgttatagcgacgtgccacttcaacagggtcgcctgcatcacgaatatcgaggaattgaacgcctttaactacgcgtccgttatcaacgtctaggcaaggaataatacgtttagcaagcatagctttttccaaaaataatcgccgttggtgaaagttcctacacaggcgctacaccttcatggagggaagaggtattctatcaaacttcacagatgttttttgcaggttttccatgtcggtttataccccgttgagtttagatgaagttcgcacctttgctgcaccttatggattagaggtgttggagctgaacccaattcagggaggtattcaaaacaccaattattttctggttgatgtaaaccgcaaacaatatgtacttaccgtatttgaagagttagatgcacaaggtgcaggcgaactaattccggtgcttgagcagttaggtactcatgatgtacccgttgccgtgccattaaagcacagcggccaagcggttcattttattgcgggtaagcctgcacaaattgcaccacgtttaatgggacaccatcccatgcaaactacagtagcccaagttgctgcaattgcagatgcacaggcgaagctacatgtagctttacaagattttccgcttgaacgcgaatatcgccgtgatcatcaatactggacaggtgttgctgagcagcttaaaccaaatatgactcaagatgaccaaacgttacttgagcaggtttatcaagcttttaatgcgaaaacagcgcagtattcaaatcgaccgacaggttttattcactcagatttgttccgtgacaatactttgtttgaaggcgagcaactacaaggtattttagatttttacgagttaaatcaagatgagttgctgtttgatattgcgattaccatcaatgatttttgtaccgaatatccagcagcgcatttaaactcagacaaagtagacgcttatttagaggcataccaaaaagtccgtgcgctgacttcagatgaacttgaatgtttagatgtattcttggcaatggcggcttgccgtttttggtcaatgcgtttgcaagttgctcaaaaaaataaagaagaaggacgtaccggcgatgacatcttgcaaaaagacccgcaagaaatgcgagcaatgatgcaagaccgtttaagccatgtaaaatcataaaagggaataaagatgcgagatcaggggcgtttagtcgaatggttcgacgaaaagggttatggctttattcagccggatgatgctgaaaaagagcgagtctttttgcatatcaaagattttgcacgccccggacctcggccaattattggttgtgcactggaatatctggtaatcctcgacgaacgaggccgttttcgtgctcagcaggtcacgtatttaaaggcatctcaaacccgtaaggctttaaaacctacaaaaacacaatcttcttttcagaccagcccatggtctgctatgcaaatggggattgtgttttatttcgttttaatgggcattatgagttttattcatattttgccggcttataccttattgtttgtcttaatgatgaatgtgttgagttactggctatattcacaagataaagaagcagcgcaattgggtaatcgccgtgttcctgagcagactttgcacattgtcagtttcttagggggatggccagctgcgtggtgggcacaacaaaaactgagacataaaacacaaaaacaaccatttcgtaagatttatttttgtaccatattctttcatttacttttgattttgtggctaatttctcctttaaacgttttgcggggatcataaaagtaaattgttttattaaacttgagaggtataaaaatgaatagttctatcgaccaagatccaaatcgtactttaacacttatcttatatgtactttatattgttgccatttttacaggcggcttacttgcgattattgctttaattattaactatgtaaaacgctctgatgtgcaaggttcaatttttgcgagccactttacatggcaaatcagaacattctggtggtacttggcttggaatattattgcctttttgccgtttattttcttgttctttacgggtgaaaataccgatctatttgcaggcgttgctatttcatcgactgtattctgtgtgggtgttatcgcggcagcatggatctggattgtatatcgtgcaattcgcggtttgattgcgttaaatgataaccgaccgatgtattaataaatcatgattattgaacatgtgcatttgaaaataaaatcgggacaaagtgaagcatttcttaaggcattcgagcaggctaaacatattgtttctctaatggaaggtttcaatgcggtccaactgattaagcatacaaccgatccccatcattatattttaatgattttctgggatgaaattgaaaatcatacagaagggtttagaaagtcggaggcttatcaagaatggaaaaaattgcttcatccattttatgatccaatgccgacagttgagtactacgaaccctctattttattaaagaaaagtgatatataaaaaagagagcgttaagctctcttttttattctcggactcttttgtttttcttaataggcagcttaatttttaactcactgactaaaacacctaacaccactaaagcccccccaaaaagggcaataactggtaaacgctcacctgcaattcgaccaataatacctgcccaaacaggttctcctgcatagataattgcagcacgcgaagggtcaaccacacgttgagcccagttcattacaaattgaatgagtgcacttgctaagcctaatgcgacagcaatgagtattagaggccatgaaaatgctggaattgtatgttcacctactataggcataatggtaaacgaaagtagagaggcgacaccaagttgaataatggtgacgcgacgcaaatttacctttccagcaaagtagctaataaaaataatttctaaggcaatcgcaaaggcgccgagcactgttaaaagctgtccaaaactcaaggaaatttgcttaaaaccattacccgtcaataaaacaaggccagtaaaagcaagagctgctcccacccaagtcatgatatgtggagtttttctaaatatgagccacattaaaataggaacaagcggaacatacagcgccgttaaaaaagctgattcactactcggaatagtttgcaggccaattgtctgcgtgccatagccagctgcaatgacaaggccaattacactgccagcgcccaagtcttttaatgtaacgcctttcatgctctttaatgaaataagtaatagcgttaaggcagctacggcaaaacggcagcctacaaaaaacataggtgatgaaaaattcagtgcgtactgcacagtaagaaatgttccaccccaaatgaccgtaatcaaaatgagagctaattgaggaactttgcttgaactcagataagttggtgacatactcaaactaaagggaattgtgcaatatactgcacatattgcgctattcttctgttttgtgcaatatattgctcaaattttctttattcatctattttatgagccagtcgagtagcgttttacaacatgtaggcacaaatatccgttcattaagagatgagcgtagtttaagccaacaggacttggctgatcgggcaggtgtaagtagacgtaccattgctgctctggaaacaggccaagtcaatattagcttagctaaactcgatgcgattgcggcagtgttgggagtagattttagaacaattgtgagtgcgcctgagctaaaagaacatgccctagtaaatgcactcgcttggcaaggtgaaaaggaagaaagtaaggcaacttttcttgcttcagttccttcccgttctcaagttgaactttggacatggtctttggctgttggggagtcttatgttgctgaagccgatgctgaaggatggcaagaactgatttatgtgttagaaggcgaattgaccatacaatttacagacagctcaaaaaccatagcggctggttcatcttttatttttgccagttcagtgacttatacctatatcaatagcggtagccaagtacttaaatttattcgtaatgtggtgtattgattcggaatatattttcatatcagcaataaaaaagagcctaatcaggctcttttttacatcttaaaaaattaaagacggttttcatctaacaaaagctgagcttcacgaaggtttaaagtaccttcataaattgcacggcctgtgattgcacctaaaatgcccggttggccttttaagttacgaacgtcatcaaggttggttacaccacctgaagcaatgactggtaagcctgagtattgagccaagtttacagtttgctcaacatttacaccttgcatcatgccgtcacgcgcaatgtctgtgtaaacaatgctagacacgcctgcatctgcaaagcgttttgctaaatcagttgctttcacatcagtaacgtttgcccaaccgtcagttgcaaccatgccattcatggcatcaataccgacaatgatgtggcctgcaaaacgtttacaagcttcttctacaaattcaggctcttgaacggctttagtaccgataatgacaaaagtcacgccagcttctaaatagtgttcaatggtttctaatgagcggataccgccaccaatttgaattggtaattctggctgagcttttgcaattgcttcaacaacaggtttatgaataggcgtacctgcgaaagcaccattcaaatcgaccaaatgcaaacgtcgtgcgccttcatttacccaatgctgggcagttgcaaccggatcgtcagagaaaacggtatcgtcttccatacgcccttgttttaaacgcacacatttaccatctttcaggtcaattgctggaatgattagcatgctttcgctccttgcttcatcatgtttatgaaattgtgcacatcttagcaaagtattgatcaatcgctaagccttagaaaagacttttataactttacctttgaagtgcggtttgaatcttttcagaaatatgtatcggtaatacttttctttttttaagctcgagaaataccaatagggcagcataggcgtcagcagctgcataactgatttgttgtgaagtaagcggttttcgcgcccaatttgaagttccgactttcttcgacttggcaagatactgaccaagtaatagtgctacggctttttgtacacccatttgttgtttaaaaccaaagtggctaaaacctttagcaaggtcaacgcagctttcaagctctatgccttttttgtgaaaaatatgcttatcatttttaagcccaaacccgactttaatttgttttggattagacaaaatgggctgtaaaaattttaaagtcgataaattgacatgaaataaataggctttgtgttctgtagccagctgaatcaaatgtgggccagttgatacttcacctacctgaaaagtaggtttagattcagaatcaaatcctaaaaaggtcgctgcttttaattcttcttcaatagttttgcattgctcgccattttcaatcaccacaatattttgatggttaagattttcaaaaggagggagctgctgaatagaagttttatcaagaagggcagaggcttcagacatatttaacagcgtacaaatgaatagggctattcactttatatatgaataaagcctagagaactaggctttatgtacatctttaaaaattattcagactgagatgggctaccaattacaatactttcgcttttctcgacatagccttcataggttggagccataattacggcaataacaccaaaaattaatgcaagcggaataagcacaatataaatccagcctaaaacacgctcccagcttggcgttggacgcttaggtccataatcattaggaccttcagttccttttgcacagaataaataaatggcaaggccaatattcacgaccggtactagcatcagtaaagagagccaccctgtattattgcggtcatgcaaacggcggatggtaaatacgaagttaatataaataccgactatataaagaattgctatacagattaagccaggcgtagaaaagtctggggcaccttcagggtttgtaaaaccaaaagtaaacataataagtagaatggcggtaacaaggactagcgtaaataagaatgtccaagctgcataagagagtcgtccaaaacgaccatttgccttaaacggtgaatcttgtgaaatgggctgattttcaaaaggtgaattcattgtgtttatcctaatcatttgattttatttaaaagtatgaatattcaatattttgttgaataaaatatcattctataaatgattggttattattataaataaaaaaacagatcaggctatcttgacctgatctgttttagtttttgaatcgaattaaatattccattccacaaagtttttcagtaactgcaaaccagcagtgtgacttttctctgggtggaattgagtcgcgaataaattatctttgtgaattgctgtgcagaagttcacgccatactcacatgtagcagccacaagattttcatctttaggttcaacatagtagctgtgtacaaagtagaagcgggcatcttgttcaatgttgttccacatcgggtgacttgggtccatttggtgaacctgattccaacccatgtgtgggacttttaaaccttccatttgaggaaagtgttttactaccccgtcaaaaatacctaaggcatctacaccgccgttttcttctgagctttgtagtagtgcctgcatgcctacgcaaattgcaagaacaggcttattaaaagctgctttacgtacaacttcatcaatacctgcttcacgcatgccttgcatacagtcacgcattgccccaacacccgggaaaacaattttgtcggcttgtgcaattaattttggatcatttgtcacatcgacggttgcacctacatattcaagtgctttagcggctgagtgcagattacccatgccataatcaagcaatgcgatacgtgtcattagaggctaccttttgtcgatgcaatcgtgttttcagcacgtggatcaatttcacatgccatacgtaaagcacgagctagtgctttaaatacactctcgatttgatggtggctatttttacctttcaagttatcgatgtgtaaggtcataagcgcatggtttacgaaaccttggaaaaactcggaaaataaatctacgtcaaaggtaccgatgcgcgcgcgagtaaatggaatatccataaataaacccggacgtccagacaaatctacaaccacacgagataaagcttcgtctaatggcgcgtaaaaatgcccataacgacgtaaaccttttttatcacctaaagcttgtgcaaaagcttgtccaagcgtgataccgcagtcttctacggtatggtgatcgtcaatctctaagtctccatcacaatgaatatcgatatcaaataagccatgtcgcttgatttgatcaatcatatggtctaaaaatggaactccggtgtttagtgtgccttgaccagtaccatcgagatttaaacgaactcgaattttggtttcattggtatttctaaccacttcactgatacgttgcgtcatggacacgttcctcaaaaaacgtcaaaaatgattggatgttaacgacaatttcgctgtgacgaattcgtgacagcatcatagtttgctcaggagggttaatcaatgcctattaccgtacatgcttatagttctctagataattcagagatccgcgatcagcttgagcgactgtatgacacaagtccggagtttggtgacgggcacgatgcgattgaacaacttgaacaagatttacaacagtataccacgctatacactgccgaatttaacaccaaaattataggtgcaatctggtgttcaggacaaggtgaaagcaaggtgcttgaatatatagttgtacaccctgcaaatcgtggacgcggagtagcagagcgtctagttgaagaagcttgtcgtatagaagaagcaaaaggcgttaaaatttttgagccaggttgtggtgcaattcatcgctgcttagctcatattggtaaattgcatagctaaaatcctatttttacggcacttgtgatttaaaattaaacacttgttacaaaaaatgcggaagttgcttgacgtcctcctataaacattgtttaatacgcccacttcggcgtgatagctcagttggtagagcaacggattgaaaatccgtgtgtccccagttcgatcctgggtctcgccaccattatttgtgttttcaatccctgatcccatcagggattttttttgagtataaaaaatactcatttaaatcaaaaactcaggataattgttgactattgttctgagatacggcttaatacaggccatcggcgtgatagctcagttggtagagcaacggattgaaaatccgtgtgtccccagttcgatcctgggtctcgccaccatattcgaaaaagccccatacttaaagtatggggcttttttcatgcctatttatttgattcgtgattagaatgacttcacctgtgtataactctcattttatccacaagtaaagtgagttatcccaaggtctagctttatttcctaaaggttcttcatttcaagaggcgcctttagtcatgagagttgtcactaataagacgttttcctaaacataccgcttctacttcgtcatagccgagctgctcgtaaaaattcaacacattcagattatctttacgtactaataattgtaatttgggacagccacgcgccataagccgcttctcaagctgttgaacaagcgctgtggctattcctaagcgttgttggtggggatgaacagccagataattaatccagcctctatggccgtcgtagccgcccataagcgtaccaattagttgctcatccttaatagcaacgaggaataaatcatcctgctgcgaaactttcctgaaaatatccgtttcagggttattccaggggcgagttaggccacagctttcccataaattgaccacatcatccagatctgcatttgtaaattggcgaataatgaacatatggatttctactttttgttttgatgtattgaaaagataaaataaaaattcgaacttgagcagtagtttgtgaataatttacacaaataaaaaagcacccctgtaggagtgcttaaattaaaagtatgacttaagctgattttgcaactggtgttggttgaagcatttggcctgtttcttcgaagtttgcatgccaagacaatgcttcacgaagtaagtgaggtgtatgtccgcctttagcacatgcacgatcaaagtagtcatttaatgcatcacggtaaagcgggtgtacgcagttgtcgataatagcgcgagcgcgttcacgaggtgctaaaccacgtaagtctgctaaaccttgctctgtcactaaaatatcaacgtcgtgttcactgtggtcaacgtggctcaccattggcacgatagaagaaatatctccgcctttagcaatagatttggttacaaagattgccaagtgcgcattacgagcgaagtcacctgaaccaccaataccgttcatcattttagtaccgcacacgtgagttgagttcacgttaccgtaaatatcaaactcaagtgcagtattaataccgataatacctaaacgacgtacaagctcagggtgattagaaatttcttgtggacgaagcactaatttgtctttgtaagcttcgatattgccaaaaactttttcaccgcattttgctgaaagcgtaattgaactaccagaagcaaatttcattttgcctgcatcaattaattcaaaagtacagtcttgtagtacttctgagtacatgatgaggtcttcaaaattagaatcttttaaacctgttagtacagcgtttgcaattgaaccgatccctgcttggagtggaccaaggtttttcggtaaacgaccttcagccacttctttttcaaagaatgcgataaggtgattggcaatgccttgagtctcatcatctggtggagtgactgtcgatggagagtcatgtgtatcgttaaagacaataccaacaattttcgaaggatcgatttggatagctgttgtaccaatacgttcgtccacttttgttaatggaattggtgtgcgtgttggacggtaagttggaatatagatatcgtgcaaaccttcaaagctttcgcttaaagaagtgttgatttcaacaattactttttcggcaaaaatcgcaaaacttgcagagttaccaacagaagttgttggaataatgccaccatcttcagtaatcgcaattgcttcaatgaccgcaacatctggacgtttaagttgctggttacgcatttgctcaacagtttctgacaagtgttggtcaataaacatgacttcgccgttgttaattgcgcggcgcaaagtgttatccacttggaatggcatgcgacgagataaaacacctgcttccgtgagttgtttgtctaagtcattacctaagctagcacccgtaattaacgtgatttttaacggattcttttttgcaagctctacaagtgcttgtggaacagctttagcttcaccggcacgagtaaaaccactcataccaacggtcattccattttcgatgaattgcgcagcttgttcagcactgatgaccttgtcatgaagagaagctaggcgaatacgacttaaagacattggacatcctcaatattgtcaaaacataccggattttagctatgaaaaaatgaaaagtgcataggtgttaggctaaggtctaattttttaaataaatgcgggtataacttatttttatgatttttaatatattgattattattgtcttttttgaggtttaaaatagcgctttaaatgttcaattgctcaaattaaaagcgctcacttaaagtttgtttgattttttctaaaggattatgcgttgtattttcttcaggggcgggttttggaattggtaaagaaataattacctctaaaccgccttgttcacgattgtgaatctggatttcaccttggtgaatatcgacaatacgtttaacaatggcaagacccaaaccgcttccctgaatcgttctagccgagttgcctcttacaaaaggctgcattaattcttcaatttgatcttctggaatgccttcaccatggtcagcaaccgtaattaaaatatgttcattttcaacctttgcactgagttcgatcggttcagcaccataacgctttgcgttattaatgaggttggcaataagtcgttttaaagagaggctgcgtgcaggaataatcggaacatcctgcatgttaaagcgaatatcaaggggtttaaactgaaccaccaattcttgtaaaagaatattgatattagtgtcttttaattcctcatctgaaccatcgcgcatatatgagatgaactgatttagaatcgcatccatatcatctacgtcataaaccagaccttcacgtagaaactcatcaggtagcatttctgcagttaaacgaatacgtgtgaggggagtccttaaatcatgtgaaattcccgctagcatgattcgtctttcacgctcagtttgttcaagcgtatataccatacggttaaatgcttggtttacttggcgaatttctaaagggccatggttagtatctaaataaggtgcagttccagacttactgtattcgttggcagcattttgcaaacgacgtaatggtcggttcatttgtcgaaccaaaattaaaatgatgatggccgaaactaatgggacacccacaacccagcctaccagtagctcggggctatagttggcataggtttttaaaggttcacgaacccagttaccatgcatttctggcgtttgaatccaaatacgtgggctaggtttaaattggaaatagacagtaacgtcttttgcgccaatttcatttgccagtttttgctcaacttggttggtaaaaaactcggcaataattttatcgcgaacacttggatattctttggggttcgtgacatattcaatgccaacccgattgcgtaaccatgtgtcgacgtcaacttcgctatcgcgatgaaaaatacgaatattagggttatttaccagttctagttcaactgctagatagcgcgcatgttgctgaatttcaggtaaatagagggttcgccaaaaaaaccacaatgacataaataagctaaagagtaccaccagcagtaccaaaattgtggtacgcatggccgcagaacgtggcttaatcttgtcgagaaaacgttcccatcgggtccgtttacgctctgagtacgcaacgtagtcggtaaaggtttgcggtggtattggctctaaactcactctattttatctcaagcttattcagcaccatccggaacaaacacatagcctacgccccatacagtttgaatgtaacgtgcgcgtgccgggttatcttcaattaagcggcgtagacgagacacttgaacatcaatagaacgttccattgcaccccattcacggccacgagccaagttcatgagcttgtcgcgtgttaaaggttcacgtggatgctgtaccaaagcttttaatacggcaaattcacctgtagtcaatgtaacgatttgaccctcacgagtcagtgtacgtgtagataaatctagagaccatggaccgaagctaaccacttcaacttgttggcttggcgcacccggaacttcacgtacctgacgacgcaatactgcgcgaatacgcgctaaaagttcatttgggttaaatggttttggtaaatagtcatctgcgccggcttcaagaccagcaatacggtcagagtcactaccacgtgcagttaacatgataattggagtatcaatatttgactgacgtaaacgacgacaaatacttaaaccatcttcaacgggcaacataaagtcgagcacgataagtgaaaataactcacgttgtaataaacgatccatttgtgaggcatcatgggcagtttttacaacaaagcctttatcttccaaaaaacgttgcaagagggtacgtaaacgcacatcgtcatcgaccactaaaatgcgctcgacacgatccgtttcgttatgtacggtttcaggatgttcagcaggtacaactaaactcatgatgtactcccttttaaagtcataatttatatattattggatcggttaggcttattgccaacaagccctcagtataatgccgatgttcttgttaagactatgtatcaatttgctcaaaattacaattttcgtaggggcttgaaaccaaaaaacaacatcttatgcccataatttagcaaagccttaaagaaaaactcaaatatttgactatttacctctttcttatcgagtaaattctaataaatatttgtttcaaataaattattttaaaaatgagtttcggtttttaagttctaacttttaatttattcattcacggtttaagtatgaagacttaataatttatttagaaagataagaaaaactatattttgatcgttctggcaatgtatcaatatgttctttttctcataatttatattaaaaattttctttaattaaagaagtatctataaatttcatattttttaaaaggtaaaaggctagcttaaaggcccaaatgagtcacagaaaaaacttttttacggccataagaatgtgaaaaattcatagtcaatacaaaaaaacgttttgaatacgcaaacaagtgtggattttatggtcttggtctttataatcagtgcttttaaactttatccttgtgggatcaaacacgatgactgacttagttcagcagttggcaagtgagcttgccgtacgtccaaaccaagtagaagctgccatccgcttaattgatgaaggtgccagtgttccattcattgcccgttaccgtaaagaagtaacacaaggtttagatgatacgcagttacgccaattagatactcgtttagcgtatttacgtgatttatatgagcgccgtgaaaaggtcattcagtcattgcaagaacagaataaattgaatgatgacttgttggcgcgggtgaatgcagccgaaacaaaaaatgctttagaagaaatttatgcgccgtaccgtcctaaacgtacgagcaaatctttcaaggcgaaagaagcgggccttggaccaattgccgaaaaaattatttcagaacaaattgatccgacagaagcattggctggttttagtcatgaagactatccggacgttgaaagtcaattagacgcaatccagcatattctgattgatgactgggcacaaaacattcctcttactacagaattaaaagcaacttttgcaaaaacagcagtattaaaaagtactgttgcatctgaagagaagaaagaagtgggcaaaaagttccgcgattactttgaattctcggaaggcctaaacaaattaccatcacatcgtttattggcgatgttacgtggccgccaagaaaacgtacttggtttaaaagttgatggcgaagatgatgcaccattggctcgtattgaaactgaatacaaccttgatcaggttcagccacaaacacgtcaagatttcttaaaacaaactgcaaaattattttggttaggtaaagttcgtcctcaaatcgagcattcattacttacagaaaaacgtcttgctgctgaagcagaagcaatgcaggtgtttgctgaaaatcttcgtcacttattgttatcagcgccagctggtagccgtacgactttgggtgttgaccctggtattcgtactggtgtgaaactagccgtagtaagcgaagctggtgatgtacttgcacatagcacgatttatccatttgcgcctaaagaagataaagaaggttcaattgctgaacttgcacgtctatgccgtgaatacaatgtcgagcttattgctattggcaatggtactgcaagccgtgaaacagaagctgttgtagctgaaatgatggctgcaaatacagatcttaaattaactcgtgtaactgtaagcgaagcaggtgcctctgtttactctgcaagtgaacttgctgcggcggaacttccagagcttgatgtttcaatccgtggggcagtttctattgcgcgccgtttacaagacccgttggctgagcttgttaaaattgatccgaagtcgattggcgtaggtcaatatcaacacgatgtgaaccaaactggtttagcaaaaacgcttgatgcggttgtagaagactgtgtgaatgctgtcggggtagatgtaaatactgcttcaccagcaatcttggcttatattgcaggtttaaacaaagcaattgcacagcaaattgttgaataccgtaaagagcatggccgttttgacacacgtcaggcacttaaaaatgtaccgcgtcttggcgaacgtacttttgaacaggcagctggtttcttgcgtatccaaaatggttcagagccattagatgcatctgctgttcaccctgaaagttatggtcttgttgagaaaattgttgcagcaaaagcgacaacggtaaaagacattattggtaataccgaaattattcgtcaggtaaaagcagaagagtttgttgatgacaaattcggtttgccaaccattcaagacgttttagcagaacttgaaaaaccgggccgtgaccctcgtccagaattccgcacagctaaattccgtgaagacattactgaagttgctcagttgactgaaggtatgcagcttgaaggtgttgtgacgaacgtgacgaattttggtgcttttgttgatattggtgtgcatcaagatggtttggttcatatctctgaattagccaatgagttcgtttctgacccgcataaagtggtaaaaccaggtcagatcgtacaagtgcgtgttatgcaggttgatgttgaacgtaaccgtgtgaacttgagtatgcgtgcagaaggtgcggcacctgtgaaagcacagcgaccaccacgtcgtgaacaaaataacgaacagcgttctgagcgtaaaccacaaggtaaacgtccacaaccgcgtaaagatcaagttgaacgtccgcagcgtagtaagcaagaaaaaccacaagagcaaaaaattggtggttttggtgcattattattgcaagcaggaattaagggttctaaataagagcctttagagaacttaaaaaagcctcctaaacgggaggcttttttattgtttctaaatcatcttctaaatggctagcgctatgttttattaaaacatcacgctcataaagatgaggtgaatcttaagatcaacaaaaacgtcgtgaaatctacaatcaactatacaacgttatagcataactcaactttaacccgattcagttgtcagacaatatcgataaagccttgaagtaagttcctcactttcaggcagttacattaaaaattgattgtttttttatattataaatggttgtttttatgccggctttagaactgaaaaatagatttcacgtaaacgacctcctttcgggagttgtcgtatttctcgtggccttacccttatgtttgggtattgccttagcctcaggtgctccaattatttctggcattattgctggaatagtgggtggaattattgttggcctgctgagtggctctcacatcagcgtttctggcccagcagcagggttgactgcggtcatccttgtacaactcgatcaattaggcggcaattatgccgcctttttattgtgtattgtatttgcaggaattttacaaattctgtttggtgtatttaagttgggtttctttgccaactttattccaaacaatgtcattttaggattattggcagccattggtgccattttgattgtgacacagttaccttatttatttgggttgactgatttttcatggaaagaagtttggactgctactccggatacgtttatccaaaaatttgatgctggagcagcattgattgggctgctgagcttatttttaattttagcttgggacagtagcccacttaaaaagttagcgttgccttctgccttaattgccgtggtactcgcagcagtttttaactttgttttaataagtatcggttcttcatgggctgtgcaaagtaataatttgattcaactaccaaatatattgcaagcaccagaagaggtattggtttttcctgactttagctatttagctgaaccattaatttataccggagccattacacttgcgatcgtggcatctttagaaacattactaaatttagaagcagcagataaacttgatcctcaaaagcgttcatctccacctaatcgtgagttatgggcgcaaggagcaggtaatattgtgtcaggtttgattggcggaatgccagtgacctcagtgattgtccgtagttctgtaaatgccaatacaggtgcacgtagtaaatgctcaaccattattcacggtgtgttgttactgcttgcaattctattttttgtcccactcatgaacatgattcctttgtctgcacttgcagcaattttgatcgtgactggttttaaactgactcatccaaagttattcaaacagctttaccaaaaaggttggagacagtttttaccattcattattaccttggttgcaatcttgctgacagatttattaaccggaatcttggtggggctatttaccagtagtgcatttattttatatggcaacttcaataaaggtgttcgtgtttataaagaaaagcatttacatggaatcgtgacgcgtattgaacttccttcacaagtgacttttctgaatcgttccgcgctcatttctgccttggaacatgttcataaagatcaacagttgattattgatgccactcaatgtgattcgattgatccggatatttatcaagtcattcaagactatcaaaatgagacggcagttaaacgccaagtcgaccttaagcttattggatttaagcagcactatgaagaggtagatgatgcagtactggatatctacattagtacgagagatctacaacgtaaattaagtccacagcaagtcattactttacttaaagaaggaaatgaacgtttcgtaaaaaatgagcgcttgcaacgtgatatttatcgccaaattcgtgttactgcagatgaaggccagcacccaattgctgccgttttgggttgtatggactcacgtgctccaactgaaatgatttttgatgtgggtattggtgatctatttagtttaaggattgcaggtaatattgcaggtcaaaaggtattaggctcgcttgagtttgcttgtcaggccaaaggctcaaaagtcattttagttttaggccatactgactgtggtgcagtgacgagtgcatgtcagttacgcttacagcaaaagcaaatctctgatgtcaaagagatgccgcatattcaatatgtgcttggtccgctcatgcattcggtagaaagcgtatatgacattatgcaaccccgtgaattaaacaagaccttcgtaaatcaggtaactgctatgaatgttcactacaatatccaatatattattaataacagtacggtacttaaagacttattggatcgtggtgaaatagcgattgttggcgcgatttacgatgttaaaacagggcatgtcgagtttttagatgcgtaaatagaatcaaataaaaaagcgcctttcatgaggcgcttttttatttaagttcgctgaatattttaaattaccaatgctcacctgggaaaatgcgtgcatatgctttttgcacccagttaagtttttcagcttttttgccttttgcggcgtctgaacttggaaacagacggaaaccaatcgacataaacatattgttaatgccaggggccactgaataggtcatagaagccaaacggcctaagttagttgcaatacgttttggacgtttcacaattgcataagcaattaaatcggctgcttgctcaggtgagagagtcggtacatatttataaatcttggtcggcgcaatcattggtgtacgcactaaaggcatgtaaattgaagtgattgcaattttatgtgcatgaacttctgccgatagacaacggctaaatgcatcaagcgcagctttagaagcaacataagccgagaagcgggttgcatttgctaatacaccaatcgaactaatattaataatttgcccatctttgcgttgaatcatgtgaggcaaaatattgagtactaaacgtacagcgccaaagtagtttaattgcatagtacgttcaaagtcgtggaaacgatcataagactcatgaacagcacgacgaatagagcgacctgcgttattaattaaaatatcaatatggtcaacagaagctaaaatctctttagaaacctgatcaatcatttccatgtcattcagatcacatgggaaaattgatgcctgaccgccacggctttcaatatctgctttgacttcttctaatgtttcttgagtacgggcaaccagtaaaacatgcgcaccagcgtcagcaagtttattggaaatcgttaaaccgattccacttgaggcgcctgtcactaagatgactttaccttgtaccttttcctggaacagagcttctaattttttattcacagcattttacctaagtaggggcaggggctatttattccggtatgtaatttttatttttacaaccgttggttcatcctgatgaactcctaaatattgccttatcttaatagatgtttaaaaattgtctagtgtgtaaatatatgaaatttaacaatttatttagagtaaaaactctaaattattaccctaatccattaattattcttaatagttaaatcacttaaaaataaaaaagcctctatattccagaggcttgttagatgggtttaaaatttatacggatgaaagtgcttgttctaaatcggcaatgaggtcatcaacatgctcgataccaattgaaagacgtaccatatcttcacttacaccagcagcttttagttcttgttcgttgagttggcggtgagttgtggttgcagggtgacacgccagacttttcgcatcaccaatattcacaagacgggtaaatagctgaagggcatcaatgaagcgagtaccgccttcacggccatcttgaaccccaaaagataaaattgcagaaggtttaccttttacatatttttgcgcaagttgatgttgtggatgatcttttaagcctgcgtaattgacccattttactttcggatgattttgcaaatattccgcaattctttgtgcattttcagtatggcgttccatccgtaaattaagcgtttctagaccctgtaaaattaagaaaacactgagcgggctaatagctgcgcctgtattacgtaatggtacaacgcgagcccttgctatataggcagcttcacctaatgcctctacatagttcacaccatgatagcttgggtctggcgtgttcaatactttaaaacgctccggatatttaccccaaggaaacttaccgctatcgataatcgcaccaccaatactattgccatgtccaccaatatatttagtcaaagaatgtatgacgatatcggcgccatattggaatggttttaataaagcaggggtagcgactgtattatcaacaacgacaggtacgccatattcatgggcgattttcgaaatttcttctagatcgatgatatttccgagcggattgccgattgactcaacaaaaacaagtttagttttatcatcaattaagttacgtaagctttcaggcttttgataatcaaaaaagcgaacttcaatgccttgttttggcagggtatgagcaaataagttgtacgttccaccatataaagttgagactgaggcaatattatctccagcttctgtaatcgtttggacagcataggtaatcgctgccattccagaagccaaggctaaagcaccaataccgccttctaacgcagcaaggcgctgctcaagtacggctgtggttggattcataatacgggtatagatattgccttgaacttttaaatcgaaaaggtcagcaccgtgttgtgtgttatcaaatgcatacgaagttgtttgatagatagggactgcaacagctttagtagttgcttcaggagtgtagcctgcgtgaatggctaaggtttcatctttataagtcatgattacttcatcttcgtgagttaaatattgagcgagtctagcttaaaatttatatagaaaattgcagaaattctggtttgttatccaattttaggaatatagatagaaaaatatacgctgaaacgttgtataaatcttatacgtaaacattttgcaacttattgaaaaagaaaattgtttgataaatccgtacgatggaaatcataacttcaagtcattagtgttttcatcgtataatacgcgcgattatttttgtcgcgtcttgcgatgtattggtttttcaattgaggagtcctgcgtggcccaatatatttatacgatgaaccgagtgtctaagatggttccgccaaagcgcgaaatcttaaaagacatctctttatcatttttcccgggtgccaaaattggtgttctcggtttgaacggtgcgggtaagtctaccttgcttcgtattatggctggcgtagataaagatttctctggtgaagctcgtgcacaacctggaattaaaatcggctatttagagcaagaaccgccacttgatccgactaaagacgttcgtggtaacgttgaagatggtgtgcgtgaagctttagatgctttagagcgtcttgatcaggtatttgcagaatatgcagacccagatgctgattttgatgcgcttgcaaaagagcaggaaaaattagaatcaattatccatgcttgggatgcacataacctaaacaaccagcttgaaatcgcggcagatgccttgaaccttccagcttgggatgcagatgtaactaagctttctggtggtgaacgccgtcgtgtagcactttgccgtttattgctctctaaaccagatatgttgcttcttgacgaaccaacgaaccatttggatgccgagtctgtatcttggttagagcgtttcttaaaagatttccctggcacaatcgtggcgattacgcacgaccgttatttcttagataatgttgccgagtggatcttggagcttgaccgtggacacggtattccttatcaaggtaactatacttcttggttggagcaaaaaaatgctcgtttagaacaagagcagaaacaagaagaatcttttgctaaagcattgaaaaaagaacttgaatgggttcgtcaaaatgcgaaaggtcagcaaaagaaaaacaaagcgcgtatggagcgttttgaagagcttaactcacgcgaattccaacagcgtaatgagacctctgaaatctatattccacctggtccacgtttaggtaacaaagttgttgaagtagaaaatatcagcaagtcatttggtgatcgtttactttacgaaaacttgtcatttaccgtaccaccagcagcgattgtaggtattgttggtcctaacggtgccggtaaaacgactttattccgtatgatgacaggtgagcaaaaacctgacactggtactgtaacacttggtgattcggttaaagttgcttatgttggtcagattcgtgacactttagatgataacaaaacggtttgggaagaagtttctggcggtttagacatcttgaaagtgggcgattatgaaattgcatcacgtgcttatattggtcgttttaactttaaaggccaagatcagcaaaaacgcgtaggtgaattgtcaggtggtgagcgtaaccgtttacaacttgcgaaaattttacagcaaggtgcaaacgttatcttactggatgagccatcaaacgacttggacgtagaaactttacgtgcacttgaagatgcaattttggtattcccgggtacagtaatggttgtatcgcatgaccgttggttccttgaccgtattgcgactcatatcttgtcatttgaagatgaacaaccagagttctatacaggtaactataccgagtttgaagcttatcgccgtgctaagctaggtgatgacgctcagcctcatcgcaagaaatacaaaaaaattagcggttaattactgctaaatttaaaaaccagcctaagggctggttttttgttagaaggcaagtttactaaaagcttcttgtaagcaacgttcagcatcaggatgtccctgacttgctgctttgtttaaccacttttcagcttcagtgtagtttttatctaaaccaaattgaccatttaaatagccaataccaagtttaaaggaagcgtcagcattacctcttaaagctgcacggaggtagcaccacatcgcattgcggtcatttggggtaatatctaaccaattctgcatacgttcatgatcttgtatggctaactcttcaaagcgtaagccttgttcaatttcatcctcagcttgtgaatgcatatcggctggtaagttttcaaaggcaaacaagtgattaagcccatgcttgattgttttcatattcatgacagtctccccttgttcctcaatttgattgaattgactcacacttttaagctagtcccttatatgaaaatcttatgttattttttgtaaatctgatatagcgcatttggatgaaaaatgatgaagttttagcttacataaaagttacacatgtttttacgcttagcgaaacttctataaaagtattggtatacaaacgtgaaaatagaatttaaaaagtttaagaacaaatgattattcaaaataaaaaaattgagaaaatttataaatatcaaacaaaagaaattttcttaaacaaaaccagtctaagggctggttttgtttttagattagtaagggtgcttatttagtaaagtcacctcgtaaatctgacaagatgagagaaggagctaccgtcactatatcaaatgccatcgctaaaggataaagcgccatacgcgttacacgtttaaacggatgtttcttggttatttcatctttttgttgtaaggcgattggatatggagttggaatcgtttgttgaacttttaaagtaggactggtttgataaatttggcctttaaaacgaataatagcgtagggatataaaagctgtgtttggttctccataaccataaaatgatttttaaaccctaaattttttaaattttctttctgttgatcagaaagttttgaagcgggaatattgtattgaaacttgagttcaccatgaaaatgcgtagggtcatccatttcaagtagcagaggagatggaataattaaagttctttgatttacaggaatatttttaatgatatttaaaaattccgaacttccttccgtcattaaataattaaagtcttgtcctataaatacgacgccttgttcttgctggtttttaatggcttgccccagtacaataatttgatctgtctttaaaatagttgtttggacctcagtcgtctcattcggaagggcagtcgataaaatagaagttgcacatccacttaagccaagacaagttactagtaggcaagtggtcaatgttttatacatgaacattactcttaaaaattatttttaaaaaacttaggaaacatctgggttaagaatggaacccataaatcaacgttttgtaattttattacatgtagctcgcctgctatagttgcttcgtgcaatttctaacagccatggtgtactgttgccacgttctgcaattttcacgtccgtcttattctgtttgcttatattccagagtttatggaatatagcagcggctttttgcgcgcatgaaaatcaagaaaaagcactacatcattttggtcatcatgcagctttaaatgtatatcaaacgtcttctcatacccatgttgaacatactgagactttagatgctgctcataaagcacctttaaacttacaagaccatcatgatcatttaccgacatgttttcatgtcgtcatgacagaagttgcaaaacaagctcaaacccctgttttacatgtgcatgaactttcacaaatttatcattggtccaattcttaccagtctccacatcttagtgccttaaaaccgcctcctgttttaaccccgctataggtggggtagccaaaaaaagcccaccagaaatttatttatttcaaagggttattttatgcttaattatatgtgcaaacaaagcgcagcaatcttctatgtagattactcgcttaaacattcacgtctttatgttaatgacaaggcgggatataaggttctgtcaaatttttccggaacacaaaaatatcattttaatgaatcggttatcttatctctgatgattcacagtgatggaggtttatggaaatgaatattttatttaccccccgtgttagaactgtgagctcccgagtgattgggctgattttagctattattcttgctttaagttttagtaaatggcatttccaggcggcatttatagaacatattttatggttctttggatggttttttgtgggcataggagtaatgggaagaatatggtgcagtctttacatttccggatttaagaatgctaagttggtgacagacggtccctattctttatgtagaaatccactctatctgtttagttatctgggtggagtcgggatcatgttgattacagagacgtttatctttccaatagtattcacgctttattttctctgttactaccattttgttatacgccaagaagaagcattcctaagtgaaaaatatggaactgcatattcagattatataaagacaattccacgctttttaccaagtttcaaaaattttaaagagcctgagttctatcaggtttcaccgaagcatttccgtatttttttgacgcaggtggtgtggtttatctgggttgcggccttagtccaactttttgatgagttgcgactgcacggtgttctcccttcattgtttagttggttctaaaaatgaaatgaaagtatatccgcatgcttcttagagactcagaagatttgtcctgaattgattaactaaggtatgcgaaaaattaattttatttctgggataagtccttaaataaattaggaatatttagatctggtgattattatgtctattaaactaaatacaaaatcggctttgatggttttacttctttcaacaagtttggctcatgctgatggagggttaatattcctcgaaaagaatcttaagtctcagcaagaaacaaaagctaaagctgaagaaggtaagaagcctcatttaacttgtaagcataaataattttttttgtaggaaactaattacttaataattagtttcctatgagtaaagataaagattcttaatgatttattcttatctttactcaggcgagattagaatcgcttctatactgctacttattagatgtaattttattacatgcccacggcctgctatagtggctttgctcaacttcttagtttaatggtgtgctgttgccacgttctgcacttttcatgtccgtcttattctgtttgcttatattccaaagtttatggaatgtggcagcggcattttgcgcccatgaaaatcaggaaaaggcattacatcattttggtcatcatgcagcgttgagttatgaagcttcacagcatagccatacggaaaagacagatatcgcggggactcataaagctccgttaaacttgtccgatcatcatgaccatttaccttcatgttttcatgttgtgattgtagaagcacaagaaaaaattgtttcaccgttaatacagtcatctgagccaaaacaacaatattattggtctaattcttataagtcccctcatatctctaaacaagacccgcctcctgttttaaccctgctataggtggggtagccgaaaaataacccaccagaaatattatttatttcatagggttattttatgtctatttttttatacaaaaaaagtttcgttagtctgagtacgtcttgggtacttaaatcattagttgttgctgttgcactttcaactggtgtcgtaacaaacgcagccagttcaaatcagaaccttgctgagaatacacaactacagcgtgtacagaatgttttaacttttgaacaggtgctcgatcaggttaagcagtttcagactcaaacaggaatttggcaaactcaacaagatatcgccgagagcaatatcaaacagagccagctatgggaaaatccgacggtttctgtacagcaaacgggttttaaatctggaaaagatcaggaattagaacttgggatctcgcaaaaactagatatttttggtgtacgttccgcagcaaaaaaactagcaagtgttcagcaaaatcaagttgagttaaatcaggttttatatgaggctcaactgaagctggcggtaaaatatttatggtcacaagtatctattttagagcttgaacatgaagttgctaaagcccagttaagaacgagtaagaaccttttagatgctacccgcttacgctttcaggcaggcagtattgctcaggttgatttagatcgaactctcatgacgcatgttgaaaatcagcgtttatatcaggaagttgaattatcactgagtagtgctaaaagaaaattggctaacttatggggtgagacagaagataacttcacgttacgtccagatataaaaagtacgtggcctttaaaaaatgaaagtgatatcgaccaatatttgaaacagaatttgttagaacagtccctacggcttcaagcaatacaacaaaattctgaaattaattatttaaaggcaaaaaatcggcctacgcctactgtaaatatgggcgtggttcgtagtaaaaccgcagaaacgagcagtaccgaaaatcagatccgagtaggtatagcggttcctttaaacatttttaatcgccagcaatatgccctaaaagttgctcaaagcaaactcgatttaattgaccagcagcaaagcttttataaaaagcaaagcgagaattctattcgtactctacagtacgagttagcgggtttaaagcagcaatataatttaatgaatgagcagcaaatccctttatcagagacggtacaagagaaaatgctgcttggctttaaagtcggtaaatttgcaattaccgatgttcagcaatctacccttcaattacaagaacaacgcttgaaaaaagttcaacttcttaaatctgcttggcaaaaagcaattgaggcagaaagtttagctctcgggatcgatccaaatatggtgatgtctggagatgcattaaatcaaattaatcaaaatttatggcaagacacctatcagttgccgacagttggaggggcagagtaatgtcagttaaaaaaatgaaaaaccaatggcttattgctattttgctgctgattgtctgccttgctttaagtgcttggttatttttctctggaaaaaaacagcctaatactgagaaaagtgaagaagcgcatgcagagggtgaagctggtcatgaagaatctgaaaaagaggaaggcagtttaaacttaacttctaagcaactggttgaatatggagtgaagttagagcaagtaggacgtggagaagttgagcagaatctctcgtatcctgccaaacttgttgtaaatacagaccagcaagcacatgtctcttcaactttttctgcgcgtgtagatagtgtaaatgttgcgttgggacaacaagttgaaaagggtcaggcgcttgcgactttatttgtacctgatttagtcgatcaacaagctaacttaagcatggcacaagaagcactgacattagcccagcaagattatcaacgtgaaaaacaattgtgggaacaaggggtttcagcacgtcaagattaccagcgcgcttacaatgcttatcgtcaggcgcagattcaagtgcaggctgcaaatagccgtttatctgcattgggagcaaatcgctcaagtaaaggtcgatatgttttaactgcacctttaagtggtgtaatcagtagtaaagatattgtcattggtgagcaaattggtcctgaaaaacagttatttgttattgatcgcctagatcagttatggattgaatttgtgctaccaagtgcaaatactaatattcagcctaatcaggaaattgaatttaaatcactgcaaacgaataatatttttaaagcacaggtacaaagtttaacttcagaagcagatactcaaactggtcgtctacaggttcgtgccaaggtactcacaccttcaaaagaattacgccctaacttaatggtcaatgtgttactgaaacaaaataatgcagcgactgtattacgagttaataagacagcgatacaacagattgatggaaagaatgtcgtctttattgcaaaacaggagaaggacaaaattcattttgctcctgttgcggtagagttaggcaattattcttcagatgcacaatgggtagaggttaaatctggaattactgaaaagcagcaatatgtgactcaaggtagtttcttgctcaagtccgaacttgaaaaaggggaggcagagcatggacattaataaacctgatttgccaaaggctgaaggtttgtttgatcgaattattcagttttcaattaacaacgccatttgggtcatgatgtttgttattgcttggattggtgtcggaatttatagctatcaaaaactttcaattgatgctgtgcctgatatcaccaatgtacaggtacaaatcaatagtcaggccaatggttttacagcaccagaagttgagcaaaggattacttatccgattgaaaatgccatgtctggtattccaaatctggaacagactcgttcaatttccagatatggtctttctcaggtcacgattatctttaaagatggtactgacatttactgggcaagacagctgattaaccaacgtttacaagaagctaagagtgctttaccagatagcattgatccgcaaatgtctccaatttcgactggactcggtgagatttatcaatgggtggtaaaagcagagccaaatgctaaaaaagcagatggctcagcttatagcgcgatggacctgcgtgaaattcaagactggattattcggccccagttacaacgtgtacaaggggtagccgaggttaatagcattggtggatataataaaacctatgtggtctctccagatctgacacggttacagcagttgcagattccacttaccgacttacaggatgcgcttcaaaataataatgaaaaccgtggtgccggatttattgaagagaacggccagcaactcaccgttcgtgttcccggcatgctgatgtcaatacaagatatccagaatgttacggtcgccactaaaaacggtttacctatacgggttgccgatgtagcgtcagtatcgattggtcatgatttgcgtacaggtggtgctacctataatggacaggaaactgttttaggtatcgccatgatgatgatgggtgaaaacagtaaaactattgctaaggcgattgacgataaagttcaggaaattcaaagatcactccctcagggcgtggtgattgaaacagtctatgatcgtagtagcctcgtagataaagcgattaaaacagtagctaaaaatttgattgaaggggcgattttagtcatcgttatcctttttatttttttagggaactttcgcgccgctttaatcactgcttgtattatcccattggcaatgctttttaccttaacaggtatggcggaacaaaaaatcagtgccaacctgatgagtctgggcgctttggacttcgggatcattgttgatggggccgttgttattgttgaaaactgtattcggcgtttagctgaagcgcagcatttaaaaggtcgtttattaacacgttcagagcgtttcacagaggtttttctcgcagctaaacaggcacgacgcccattaatctttggtcagatcatcattatggtcgtgtacctaccaatttttgctttagcaggcgttgaagcaaagatgtttcatcctatggcaatgaccgttgtcctagcattattgggagcaattattttatctgtgacctttgtcccggcagcagtagctctgtttattacgtgtgaagtgaaggaaaaagaaagccgctggatgatgacgctgaaaaaaggttatgcaggcttactcgataaagcatatgcctttcgatatgttgttgtcacagcagcggtcagcatcttaattttgacaagtgctattgcaacaagagtggggagtgagttcgcccctcaactcagtgagggtgattttgcattacaactcatgcgtgcaccgagcacaggcatagaagagtcgcttaagattcaagagaatgtagaaaagcagttactgaaagctttccctgaaattaaagccatttttgcaagaacaggaacagccgaggttgctaccgatgtcatgcctccaaatatttccgatggtattgttctattaaaaccacatgatcaatggccaaaccctaaagaaacgatagatgaattgcgtaccagaatgctgcaattcgtgaatcagattcctggtaataacagtgaattctcgcaaccgattgaactacgttttaatgaactcatttcaggcgtccgtagtgatatcggggtgaaagtttttggggatgatatgcaagtcctcaatcaggaagcggaaaaaatagcccaacagctacgtagtattccaggtgccagtgaagtcaaagtcgaacagactgatggtttgccattacttaatgtagatgttaatcatgcactagctgctcaatatggattatcagtcaagtctattcaggatattgtcgctgcgagtattggaggacagagtgtagggcaaattttacagggcgatagacgtttcgatttcgtgattcgcttacaggaaaacatgcgtacgcctcagcagctagcacaattaccgattcgcttaccaaacggcggtctgatccagttacaagacgttgccaaggttgagaatattctgggccttgctcaagtgagccgtgaaaatggcaaacgccgagtgattgtgacggcaaatgtgcgtgatcgtgaccttgggtcttttgtacaagagatgcaaagcaaactggcgcagcaaaagctacctagcggttattggttaggctatggagggcaatttgagaatcttgcttctgccactgcaagaatgcaaatcgttgtgccgatggcgctcatcatgatctttgtattgctgatggcggtatttagtaactttaaagacagtttacttgtatttagcggggttcctttcgctttgtctggcggattagtggctttgtggctgagagatattccgctttctatgtctgctggagtcgggtttatcgctttatcaggtgttgcggtattgaatggtttggtcatgctcacattcattaaagagctaagagcaaccctagatgttcatgctgcaacttggaaaggtgctgtactgcgactacgccctgtattaatgacggcatttgttgcttcacttggttttattccaatggctttggcaactggaactggtgcagaagttcagcggcctttggcaacagtggttattggtggcattatttcatctacgatattaactttggttttattaccggtcatttatcgatggatgaatgaagacaagacgaaaagtgttgagcattcataatgtcatcgatttgagatatcttttttgattacaaaatttaagtcgaaaaagtgtttgtaagagttaaaggtaaagatgtcttcatcgttacttttaactcaccataaagataaataaaaaggagtccgcaaaatgggtggacatcatggtcatgaccatagtcatgctgtagtgactgaaggtaatgctaaaaaattaacgattgccttggcgcttaccacgacattcttaattgttgaggtgattgcaggtttaatcacacaaagtttggcattgctctctgacgctgcacatatgtttacagatgcagctgctttagccattgctttggttgccatacagatttctaaacgtcctgccgataataaacgtactttcggttatcagcgctttgaaattctggccgctttatttaatgcacttatgctttttgtggtggcaatttatattttatatgaagcctatatccgcttttcgcagccacctgaaattcaaagtgtaggtatgctcattgtggcgaccattggtttggtaataaacctcatctcaatgaaaattcttatgtcgagtgccaataacagcttaaatgtgaaaggtgcttatctagaagtattgagtgatgcactaggctcagttggcgttattattggtgcaattattatttacttcactaattggtactggattgacacgcttattgcggtactgattggattttgggtattgccaagaacatgggttttacttaaacaaagtattaatattttgctcgaaggtgtacccgaagaagtcgatattgaaaagctacgtgcagatttactttcattaaatggtgtggagagtattcaccaactcaaagtctgggcaattacgtctaaaaatatccatttaaccgtgcacttatttgcgcctgaagctgaccgtaataagctctatcaagatgcagttgaaatgctttctcatgagcatggtattggtgaagtgacattgcaaattgaagatgatgctgagatcaactgtcagcatattgctcaacatgcttcacacgaacataacgataatgacaagacgcattcacatcagcattaagctgatgtgaatatagttttaaatttcccactcatgattgcagtcacgacatttccaatgtttttgtgactgcataaatgcttgcatagacaatttaaaatcaggcagatcgcgccagaacataaaacctgcacctacagtaaccacaaatgcaactactgttgcaatttgaagagagctgcctgcaccattgccaaaaatccacataaaaatactaatcacaaccaagagtaaaagtacaaaaatggcaggaactaaaatcactaagcttttaggcacaacaggtttagcactattaacaccttggctcaccggcataattttaacactttgacattgagggcaacgatattgcatgacagctccacattaagtttgaatctattctaacggaaatacaaagaaagaaaaaaatttgtagctgattaaaaagttgaggtgaatatccgatataaaatacttttttgaaacaaggatatataaaaaaacgatgatttatgcgtacacataaaaattaaaataatactgtagagcatgctaatctagataaaaaccaagtgtgtccaacactggaaatgagctgaaatgctcattaataggatgtgaaagaaatataaaaaggagagggacttgggtcaagaagatgacaataagtcgaagcctacaacgacatcaacagtttcagggaatcctgaccctataaaactgtcattctcacgccgtttgctgcataaaacattacagcatgcacaagatgccgtcgggtttgctagtgatactacacgtaatcttgctgaagttgctgatgcagccctagatgctttagatcaagtgacctctcatacaaagcgtggagtggtgggcatgaccaatctggcagcagggactgtcagagatatggtgtctgaaacaagtgaaactgcaagacaggttgccttaatcatggcacgtacttttctaggtaaaagtaccttgaatttgtatttgcctgaaatgctattaaacagtcaaattcgtaaacgcatagatcgttctgaaattgatgatattaaagttcaatgtggcaatgatcggtttcaggttgaaatcgatggacactatcaccgtttcctatatcgcctaagtttagattttcgagtattggaatgccgcattggacaagaaaagttcttgcgcttacgccaaatggatgaaagtctggatgtgcaaatacgtcatggtggaacattatcgaattgggctgttcgccgtattggtcgagtaggttttgaagtgattaatatgttgcctattccatcgctgattaatcatttgattcgtgatattccgggtattcagcgtgatggtcatcgcatgtggttcattgaccttgagcaagcgggttttattgatttcattaataaccgttcatggatggtagaaaaacttttaaatttaaccgactttagtattctaccgggactcaatattttaagagaaagtcgtgagcttgtgcagcaactggtagatcagttcgaaataaaaggactacgtgttcaatcaggccgtctggaagttcaagttggaatcgcaaattaaataagtatgatgggaagctggtttatgatcagcttttttattgtctagataagaaaaaagccactgtcgttatgcagtggctttttagaatttggcgtccctacggggattcgaaccccggttaccgccgtgaaagggcgatgtcctaggcctctagacgatagggacttatatgaggcatacatctgaaaaatattggcgtccctacggggattcgaaccccggttaccgccgtgaaagggcgatgtcctaggcctctagacgatagggacgtttcagaggtgggcgtatattaggtcgatttaataaaagtgtcaaatagttttctgaagaaatattaaaaaaatcagttaagcgcttaaaaataactcaaattgtagaaaatatatacgtttatagatattttttattggaaaggctcaataattgtttttaccacagcatgatgttgtaagtagccgacaatttcatgaggttggttggcaaaagtaaaaatctcttgattaataatggggggagtaaaattaaaaggtgcctcacttaatggaaaagcggttaaaaagtcatctttagaataaaagttataccagtcgccctttaaacatttaggacgttcaatgggagtggggagtttgctttgtatgacgcgaaaagaaagaggggatgctaaggtaataaagcgctgtactgaaaactgataagaaggatctgataataaatgataggcaatcacagaacccaaagagtgggcgactacaatacaatcttcatcatcatgcatttgttttaaaattctttgatgaacctcatacataaaatcaggattagataagtacatataagtttcaatcaagaattgctgaattaagctttcatgtaattttggaaaattatttaaaagaaccaccatctccttaagaacgcgatctttcaccatctgtgaagttaaatataaacgctctgataagctttgcgctggttgatcgggtgaaagagggaggtggggtataaaaggagtatgttccttaggtgttgatggttgatgatgtaaatggatgggtaaatgaaaattaaaagtttttggaagtaaagtattaagatcaagttgattggataattgatacttcgtcattaaatcgccataaaatggcatatgtatatgtagatctcttaaattaactctacagtgcaattgttttaagcccagtttaaatacttttagccagtgctcttttaaacgatgtgcggtgtaattctgctgattcatcccatggataaatataattttcattgtatacaaggaattgttttttaatataaatttaaatctacaacggtagattatataaagccagtctctaagcaaaaaaaagtgtagctttttgctacactttttaaattacaaacacttaagctttatttcgatagaaaataaagtagctgagatagcacaaggcagtaaaaattaagcaacctataaagccagcacgcatttcaggatctgctgccatacttaaacatgtaataaagcagaaaagaaaacctaaaattggaacgatagggaataacggtgctgcatattttaaatcgctaaccgtatgtccagaacggtaccattgtcgacggaaattgaactggcttaaacaaatactcatccagacaataaccatggtaaaagctgcaacacctagcaagtttttaaagatggtttcaggagcaaattgctctgataataagcctggaattgcgccgaacatcgttacaactaaagcaacaataggtgttccgctttttgaaagtgttgcaaatacacccggaaggagcttttgctctgataaagaccacatcatacgtgaagctgcatataatcccgagtttgcggctgagagtagtgcagtaataataacaaaacggatgatgtcatctgcatatggaataccgatgtaattaaatacggtaacgaaaggactattacttacgttgtcaccacctaaaccagcaagttggaaaggaagtaatgcactaattacaataatggtgcctacaaagaagataagaagacgccagattgcagcattaatcgctttagggacattctgagccggatctttagtttcgccagcagctacgccaattaactctgttccagagaaagcaaagtttacaatgagcatagtggtgaaaataggaagaaaaccgtgtgggaaccaaccttgggcagttaaattactaaacaatggagcagtttgagcgccgtggaaaggaattaaaccaaaaattgctaataatccaagcacaataaaagcaataacggtaatgaccttaactagcgctagccagaactctgactcggcaaatactcgggttgaactgatatttaacccgaaaatagttactgcaaaaataagtgtccagatccacattgaaatttgtggaaaccattcctgcataagtagagcagcggcggtaaactcggttcctagcgttgctgtccatgttagccagtacatccatgaaatcatgtaacctgtacttggactaatgtactttcgagcgtatgcgccgaaagaacccgaaacgggcatatgtacagccagctcgcctaaacagagcatgaccatgtaagcaattgcacccccaagaatataggcaataattgcgccaataggtccagtttgtgaaatgacttcccctgaacccaaaaataaaccagtaccgattgctccacctagcgataacatgacaaggtggcgagtactcatggctctttttaaaggtgcagtactgttctgatgctgagcatctagttgtttgtcagatggctgcatattacacattgagagaatttgagaaagacgctattttagataaaatagacaaatgtgcaatcaagaagcagtcaaagaatagacaggaaggtgacgatagagtctttaaaaggaatttttaaaatagaaaatggcgtccctacggggattcgaaccccggttaccgccgtgaaagggcgatgtcctaggcctctagacgatagggacttgatgaggcaaacacaaaggagcttggtggagccaagcgggatcgaaccgctgacctctacaatgccattgtagcgctctaccaactgagctatgaccccagtttgtgtgagcgcaatattagggtgaatgcgctcacacgtcaataaaaaaatgaattaagcttcgctagttgcttcatttttcggcaattttaaactttcattaagcttttcccagttttttacctcttttttactcggtgcacctacaatttctagcgcatgtcgtaagcgagcaaaggttaagtcagggccaagcgtaaccatcgactgcataactggtgttgaacttgttgagccagcaattgcaataaagaacgttggcatgaagtcacgtaatttaatgcccatctgatttgccaaatccattaaagtttgactaactgtgtcgttattccaagtaaactgactttcaagacgccaaattgcgaattgtaaactttgacgaacttgctcttgagtcaattttttactttcaaacatttcagccgtaatttgtggcatatggttaaagtagaaaccagcccaatttacagcttcagaaagtaaattaatacgtggttgaatagcggcagcaatgtcttctaaagtgctgcgatcacttttccatgtcaataaacggtctaatagttgtcctggggttaaccctttaatccattgaccatttaaccaattgagtttttcaacgtcaaaaattggtccacctagtgatacgcgttgaatatcaaagttatccatcatgtcttgtaatgtgaaaacttctctttcatccggcattgaccaacccatacggcctaaatagttgagtaaggcttctggtaaaacgccgatatcacggtagtagttaattgaggtcggatttttacgtttagataacttcgatttatctggattacgaagcaacggcatatggcaaagcgttggcatttcccaaccaaagtattggtaaagcaattgatgcttcggtgcagatggaagccattcttctccacgcaatacatgagtgatttccattaaatggtcatcaacaacgttagctaaatggtaggttggtaaaccatctgttttaagaagcacttgcatatcgacttgtgcccaaggaatttcaacttcaccacggagtaagtcgttaaatttacacacgccttcttcaggcactttcatacggataacatgaggttcacccgcttcaagacgtcgagctacttcttcttgagacagctttaaaccacgaccatcgtattttggtgtttcgccacgagcttgctgctcggcacgcatttggtcaagttcttctgctgtagcaaaacaataaaaagcatgacctttttcaacaagttctaacgcgtattgcttataaattcccatacgctctgattggcggtaaggagcatgaggaccacctacatccggaccttcagaccaatttaagcctaaccagcgtagagagtctaaaatcattttttcagattctggcgtagagcgaagctggtctgtatcttcaattcttaaaataaattccccgccatgctgtttcgcaaaacacatattgaatagggcgatgtaggcagtaccaacatgtgggaaaccggtaggagacggtgcaatacgagtacgaactttcatagttaatgggtcaaaataaaaattggaactattataacgaaaaagcccagtattctgacgttttatttaacgacagtctgggctgaaattgaaacgatgaggggtcgtttcaaatattaagaagtgtgcggctggaagattgcctgaacaaaacgtgaaaaacgttcatgctgtgctgcaagaaagttttgagttggtgtaacacggatagtattaagtacttttaactcatcatctgttgatggaagtacaatagtgttacgtttttgctgatctaaagctttttcaataagtgaagactgtttatctgaaagacttttacttggtgtatctttcagtacggctgctgtagacagttgcgatgcaaaactaagcaccaaacccaagcttaaagcttttccataatgaattttcattttctgttcatcccctcagtacatttcgtctattttttgagtttaaccaaatgtaaaattacggtaacgctacgattcaaacataaattttaataaaaaagtagaactatgtcacactttttacaaaaaatacctttattttacgctggtacctttaaatgtagcctatgtgtatccattacgtctcattatttaacaaattaatgtgtagataaagtgaagactataaataaactataagaataattacaaaacttttcaaaaaggagaaggaaaaattagagttaactatatcttttaaagtgattagtaaaacatttatttatataactatttgattgaaaactaaaaaaataaaaatatagtagacgttaaaagtaaaagtggtttttataaatgaaaagaatagcaagaattgcagtcgctacatatatggggttggcagtaagtgctgtgcaggcggcgactacatttttaaatgtttcttatgacccaactcgagagttttatcaggaatataatcaggcatttggaaagttctggaaacaacgtaccggacaggacgtggattttaaacaatcccatggaggctcaggtaaacaggctcgcgctgtagcaactggtcttgaggcagatgtggtgaccttagccttagccaatgatattgatgaaattgtaaaagcaggctttatccagccaaactggcaaaaagaattccctaataattctgcaccgtatacctctacagttgtgtttttagtacgaaaaggcaatccaaaaaatattcgggattggaatgatttaactaaacctggtgtcgaaattattacgcctaatccaaaaacgggtggggcaccgcgttggatttatctttctgcatggggatatgctttaaagcagccgggtggaaatgatgctaaagccaaagagctggttaaaaaactttatcacaacgttaaggtgttagattcgggagcgcgaggctcgcttactacatttgctgagcgtggaattggagatgttctactttcttgggagaatgaagcactattggcaacgaaaggtctcgataaagataaatatgaaattgtttacccatcaatttcaattttggcagaaccatctgttgccattgttgacaaaacagtcgacaaagacggtaaccgtactttggcaaaaggttatctcaactttttatattcacctttaggtcaagagttggctgctaaacactatttccgtcctcgtaaccctcaagttgctgctaaatatgcagcacaattcccaaaaattaaattatttacgatcaatgatgtttttggcggttgggcaaaagcccagaaaacccattttgccaatggagccatctttgatcagatttatgatggaaagcagtagataaaatattggtagagtagaagtttaaaaattagtttacttttttatagtgaagcaagtgagcctgaaaaggtgagcttgcttttttgttttgcttaaaaaatgaaaagaaaacggttttctctatgaaaaattaatattttcctacaaaaagccgtttggtgttagccataaacaaggtgataatgtgcagttacatttttacgctatgatttaactcctatgtcgcatatttctgtcttactttttgagaccgttgaaagcttattggcagatcgcacaactggggtgtatatcgatgcaacctttggacgaggtgggcatacgcgcttgttattgtcgaaactcgatgaaaacgcccgagtatatgcttttgataaagaccctcaagctctggaagttgcggctgctttagcacaagaagatccaagatttacgattattcatgcaagttttgctgatattaaggaaaaaatgcaggaaattggggtgcaaagtgtcgatggaattatggcagacttaggtgtgtcctctcctcaactcgaccaggctgaacgcggctttagctttatgcaagatggcccgttagatatgcgtatggataactctaagggattgactgctgccgaatggttacttgaggtagaagaggaagatttggcaaatatcatttatcaatatggtgaagaacgatatagtcgtcgtattgctagagcaattaaacaggccggaaaattggatactacggcgcaattggctgaaatagtaaaaacagcccatccaaaatgggaaaagcataaacatccggcgacacgtacgtttcaggcaatccgtattgctattaacaaagaactagatgatattgaagtatttttaccgcaagctgtagacttgcttaaaccaaaagggcgtttgtctgtgatcagcttccattcgcttgaagatcggttgatcaaacagtttattcaaaaagaatcaactctagcagaagattctggttgggggatgcctcaacagcaggttgatacgagaagattaaagaaaatttcacgggttcgtgcgagtgaagaagaagtaaaagcgaacccacgttcacgtagtgcatggcttcgggttgctgaacgcttggaacaaaaaggcgcgtaatgaaaagcagtgatgaaatcgaaaccacagaaaataaagtggtcaaaaaagttgtggtatatgcagtcatggtggcattggtttttatcagtgccatgatggtggtatttcaagtatttgaataccgtcatgattatagagagttaagctcttatatgcgtgaacgtgatgacctcaatgctgaatgggggcgtttattgattgagcaacaaacatttggtgcgactgctcaaattggtacacgtgctgtgacacaattacgaatgttttcgccacctgctgcagaaacggtggtaatttctttaccgatgacctcagagcaaaataagtaaggccttgctgtatggtagataagcgaacaaagcaaacacgaaaaaaacagcagtctatttcggaaaaaccaagtcttgcctttgatatgtggcggttttatctgctctgggcggtagtgctactgtgttttgtggtattaattgcacgtgcattttatgttcaagtcattaataaagactttttgcaaaataaggccaatgccaatattttgcgtactgaacgtatagaggctatgcgtggagtgattagtgatcgccacggtgtacctttagcgattagtagtccaatcatgaaaattgtgattgatccgcgtgattattttgagaccaagcatttatatgatcaaattacggctgaactaaaacaagatccaaacaaccgtaaattaaaacgccagttaccagataaaaatttaaatcttgatgaacttgccgacgtggtgggtgttgatcgtgctgatcttaaaaaacagatgaatgcgcgtccgcgttctcgctatctggttttgaaaaaagaagtacctcctcagcaagctgacctcattatgaaaggtaatttccaaggggtgtatgcagaaaaaacttataaacgttattacccgcaacctcagccaaatgcccaaattattggtttgaccaatagtgaaggtcaaggtatcgaaggcttggaaatgcagttgaataagcaactgtcaggtgtagacggtgagcaaaaaattattcgcgataagcgtggtaaccgtttaaaagtttctgaggtaattcgtgagggtgaaccaggtgaaaatattactttaagtatcgactcacgtttgcagtacattatgtaccgtgaattaacggctgcaggtgtggctaacaatgcgcgttcagcaacggcgattgcagttgatgttaaaacgggtgaaattctggcgatgaccagttggccatcttataacccgaatgataagaatggcttatcaaataaagatgctatgcgtaaccgtggtgcgatcgatatgttcgagccaggttcaaccatgaaaccttttactatttctgcagctttagaaactggtcaatatacgccaaatacgattgtaaatacctctcctggctcaatgcgtttaggctggcatactattcgtgatacccataactatggggctttgaccgtaagtggtgtcattattaagtcttcaaccgtgggttctgcaaaaattgcattatcacttccgaaagaaactttgccgagcttctttaatcgtgttggttttggtaagcgttctgcagtaaggttccctggggaaagttcaggtctggttttacctgttaataaattaaactcttctcaaatcgggaccatggcatatggttatggcttaaacgcgacaatccttcaattggctcaaggttatgccatgcttgcaaatcatggtgtcaaaatgccattaagcttgcataaactagatcagccacctaaaggtgagcaagttttaaatccgaaaattgccgatcaagttttgttaatgcttgagcaagtgactatgccgggtggtactgcaaaacaagccaatattcctggttatagggttggtggtaaaacaggtactgcacataaattgcgtgcagatggtaaaggatattcaaataatgagtatcgtgccttatttgcgggtgtcgcaccaattagtgatccacgtttagccgttattgtagtggtggaaaacccacaaggtcgctattacggtggtttggttgccgctccagtttttgctcgtattatgcaagagtcgttgcgcttaatgaatgtgccgcttgataagccacttaatactccagaaaatcctattcgcaggtaagctatgactgtttcttttcaagaaattcatccaatcgaaattgatgctcaatggcctcaacagccatttcacggctttagtttagatagtcgtaaagttgaaacgggccaaatttttattgctttgacaagttatagccagcctgaaaaaacgcgtacatttgctgaagcggctttagcaaatggagcgttggctgtcattagcgaaaccgaattaggtgtagcaaatgaatgggtatgccctgatgtgcgtcagcgcatgggagagtggcaaaaacgttatttgcaacaggctgatgtagtaaaacctttacggattatagctgtaacaggcacaaatggtaaaacaacaatttctcgtttaattgctgagttaattagttcacagcagcagcgctgtgcagtgatggggacaacagggaatggtattttacctaacttaacgccttctacgcatactaccctcgacgctctacagttacaaaatgcgctacatgattatgctaaacagggagcaacttttgcttctttagaagcaagttcacatggtcttgaacagggtcgattaaatggttgcgatattgaaattgctgtttatagcaacttaagtcgtgaccatctggattatcatggcactttagaagcttatgcagaagcgaaggcgcgtttatttcagtttaattcgttaaaagtcgctgttattaatttagatgatgcgcatgctgacttgatgattaagtctgcccaaaataatccagcacaacctaaaattttgacttactcactaactcaaaatacagctgattattacattaccgatttaagctatagcttggcgggtgcaacttttaatttagtaagtcagcaaggttcatttgcggtagaaagcccattattaggtcatttcaatgttgaaaatttaattgccgcactcatcgctgctgagcaagctggtttcgatttacaggcattggttaattttgttcctaaactaattggtgcgccaggccgaatgcaagttattcgtgatgatgagcgattatttgtagtggattatgcgcatacaccagatgcattgattcaagtgcttaaaacattaaagcgtcatgtttcgaatcagctttgggcggtgtttggatgtggtggtgaccgtgaccgtggtaagcgtccactcatgactcaagcagctttggatggcgcaaatcctgttattctgacttcagataatccaagaacagaagaccctgaacaaatttttgctgacatgaagcaaggaatcgatttttcagggcatcgtatgcatgaaattcatgaccgccgtgaagcaattaaatttgttgcagagcaagctcaagctggtgacattgtagtgattgccggcaaaggacatgaaaattatcaagaaattaatggtgtgcgtcactggtttgatgatgtggttgaagtgcgttccgcgattgatgcccaacatcatacggtagatgctgcttaccctgcacaataggaaaaattatgcatacttcaaccaccagtaccgtgcctttggaaccgtggacagctcaacaattacaacaggcaacacagggttactggcataaagaccagatccctcaaagtgaaattaaacgtattttgactgactcgcgtcatgcagaaagtggggatgcctttttagcactaaaaggtgaacgtttcgacgcgcataattttgtcgcgcaagtggctgcaaatggttgccaagtcgctattgtcgagcggcctatagatgcagaaattgctcagcttgtagttgccgatacccgtttggctttagggcaacttggtgcgtatcgccgtgaacaaaatgctcaattgaaagtaattgctttaacgggcagtagtggtaaaaccaccaccaaagaaatgctaggaagtattttgtctcgtttagcacctacattgattacccgaggcaatttaaataatgaccttggtgtgccgatgatgttgcttgagcttcgaaaggagcatcagtatgcggtgatggaacttggtgcaaatcatcaaggtgaaattgattatacatcaaaaattgttcaaccgcatgttgctggcattttaaatattggaactgctcatttgggtgagttcggcgggcgtgatggcatttgccgcgctaaatcagaaatctatcgtcatattttacctcagggcgttgctattgttccgcaacaagatgactttaccgctgagattcgtgaagcagccaaaagccatcaaatcatgagctttggtgctggtggtgatgtctttgctacagagattgaattgttgccacaatctgccaatttccaattacatacgcctcaaggttcaagttttgtaagactgccgtttgcgggtgagcacaatgtgcaaaacgcaactgcagcagtagcatttgctttggcgttaggtgttagcttggaagatatcgtaaaaggtctagagcaagcacaaggtgcaaaaggtcgtttgaattttcttcaaaaagcgcctcatttatttattgatgatacttataacgccaatccaacatctatgcgtgctgcggcacaagtattacttcagcaaaatggcattaaagtcatggtgatgggggatattggggagttaggtgatagcagttggcaagaacatcacgatttaggtcgcgatcttgctgagcttcctttagaccatattgttgcagtggggcagtttgcctcagcagctctcgaaggcgcaggccttcattctactaaattgaaagcatttcagactcaagctgaggcgcttccatttttaatcaatctaatccaaacacatcaaccccagtccatgagtttcctgtttaaaggttctcgctttactcatatggaaacgttgatggctgatttgatggagaaactttaaatgctgttatggttgtttgaacaacttgcgggctatcacagttcgtttcaggttgttcgttatttaacattacgttctttactcagtgtattaacgtcactgaccattggtttggttctcggaccaatcatgattcgtaaattacaagcgttaaaatacggtcaggcagtaagttcgtttgctcctgaaaatcatgctaagaagatgggtacaccgacgatgggtgggattttaattctgctctcaattggtattagtactttattgtgggctgatttatctaacccttatgtttggattgtacttggtgtaatggttgtgttcggtgcggttggctgggcagatgactggattaaaattcgctataaagataatgcaggtctacctgcccgtaagaagtttttctggacttctgtcgcatcgctcggtgctggtattgcgttatatttaattgctacccaacaatctaatgcagaatacacagcaaatatgctggatttattgattcctttctttaagaatctttcaattccgctttctattgttcctttaggtttagcatttattgtatttacctatttagtaattaatggtgcctctaatgcggttaacctaactgatggattagatggtttagccattatgccagtagttatggtagcgacgggcttaggcgtatttgcttatttatctggtgatattcgttttgccaactatttgcatattccttatgtgaaatatacctctgaacttgtggtaatctgttctgccatgattggtgcaggtttggcatttctttggtataacgcacatccggcgcaagtctttatgggtgatgtgggcgctttagctctaggcgcaatgcttggaaccattgccgttatggttcgccaagaaattgtattcgcaattatgggcggtgttttcgttatggaagcggtatcggtattcctgcaaatcggctcattacgaatgcggaataaacgcgtatttttgatggcacctttgcaccatcactatgaaaaacaaggctggaaagaaacccaagtagtcatccgtttctggattattacgattatgctggttgttttaggcctaatgaccttaaaattgcgctagaacttattttggtgtcaatataaagccagtttctactggctttttttattggagaggtaaatgacaaaagttgctggtctagaccaattatctgtaattaatcaaaaagtagttggagagggcgaagtcttacctcaagttgtgcttaaagatggaagtcaggtgcaaacgggaactgtcgcgacgatgctgcataatattgaactctataatgcgggggaaagagggcaaattgaagaagagttgaagatcgcaattccaactttaattaaagtgggcttatttgatttgtttgaagtagatgaatggattaagggaacaaatgcaggccgtacatttgttggaatgcacgctaaggcttatttacaacaaaaagaacaagagaataattaaacgtgactacgcaaaatttaatgtgtcctgtgtgtcgtcaacgacttgagctggtaagcaaaacatggcggtgtgaacagggccatagctatgacattgcaaagcaaggttatgtgaacttacatgttgtacagcacaaacatagtaaaaatccgggagatactcctgagtctgtagatgcgcgccgtgcttttttacaaggtggctattatcaacctttacagcaagcagtagttcatttgctgaaagatcttaaagctaaaatggtacttgatattggctgtggcgagggctattacaccagcgcaatgcaacaggtcgttgaacagtgtataggtgtagatattgcaaaaaatgcagtacaacgcgcagcaaagttaaatgacaaagtgacatgggtggttggtacaggagcaactttaccggtcatcgatcaaagcatggatgtgtgtacgagtctttttagcccgattccccaaacggaaattctgcgtgttttaaaagatgatggttatttaattgttgtgactccagcaaccgatcatttgtatgcgatgcgtgaggcattgtttgaacaggttaatcctcacacaccacagaaatttgttgaacaactacaagatttatttgagttgaaagaacagcaagttattgatgctcctttagtacttgaccagcaagctttaaaaaatcttattgctatgactccctatgcttataaggcatctccagaacgtcgtatgcaattagaacagaaagcacacttacaagtgaccgcatcttttcaaatttatctttttcaaaagcgtaataaaaaagccatctaacgatggcttttttatttttattcaatttgattaatcaagttttctaattcatctttttcacgcttcggcgctgccccttgcgaaggtttcattgctggaggtgttgtcttggaaggaatcacaatttcctcacccggtaagtcatcgaagtcattattggtggttttaggttgtggtggtgcaggacgatagagtggacgtgctaatggaggggcagcacgatatgttttcttatcgcctacttcagttgtgacttcttgcttatcgcgagaaataggtgcctgagcatctttttctaaacgaacccaagcagctggtgtaccttgcaatgcttgtcccataaagttaatccagatcggtaatgcagcaataccaccatactcacggcgaccaagtgtagtcggctggtcaaaaccaacccatgttacagttactaacttgccattaaaacctgcaaaccatgcatcttttgcatcgttagtcgtacctgttttacctcctaaatcactacggccaatcttgagtgcagcacgacctgtaccatgctcaattacatcacgtaagatatttgccatatcataagcagagcttgattttaaaatgcgctgagcttgacgatattgactgttatttttgtccgtctgtttaaggttaagttgtttggttgtcttttctttctgctctagctctttatttgtaacttcaacaacttgatcgtctggagtagttacctgtgcatcgtcagttgtctcaggagcattaatacatggaatacatgcatattctggcttggcttcgtaaatgactttaccgtatgcatcttcaatacgttgaataaaatgcggttgaacgcggtaaccaccgtttgcaaatgttgcataaccagttgccatttgaattggtaatacttgaggcgtacctaaagcaatggtgtagttacgtggaatttgatcctcttgtaaaccaaaatccatgaataattggcgagtacgttcaattcctacagtttgtaagagtcttactgaaaccgtattacgagacaaatacaaagcacggcgtaacgggatcatgcctaggtagcgaccatcagagttcttcggtgtccacttgccaatcgtaatagggctatcattcaccatactataaggtgtcatgccacgttctaatgctaaagcatagaggaatggtttgatggtagaacctggctgacgccagccttgtaaagcacggttaaattttgattgatagaaattataaccacctacaattgcttcaattgagccatcgtttgggttaattgcaatgagctgaccttgaacttttggtacttgaactagtgaccacgcagttttagcttcatttgggcgtaaacgaacaatatctttaactttaacaatttgagatgcacgagaaggcgctgcacctacgctatttgcattgcgatagggacgggcccatgacatgccggaccattgcacggttactgttgagccatcttgcattaatgcttcaaaagagctgctatttaccttggtgacttgcgccggataagtgttggcatatgctctaaattcgcttaatggcttatcatgtgcttctgcaccacgccagccatgacgacggtcataagcttcaagaccgtcctgcacagctttttccgcaatcgcttggcgtttcgcattaattgttgtgtagactttataaccagaatcaattgcttgttcaccaaaatgttttacaagctctgagcggaccatttcacctgcgtaggggtgaatattatttaagtcacggttgggcatattcaaattgattggctctgcaacggccttttgatattccgcttgagaaatataaccaagttgaagcattcggcctaaaatccagttgcgacgttcaagtgcacgctcagggttaacaactggattatatttagatggtgctttaggcaagccggcaatcatggccatttgggcaatgctgagctcattaatgcttttgttgtagtaaatctttgcagccgctgcgataccgtaagcgtttttacctaagaaaatcttatttacatagaggcttaagatgtcttctttagataagttttgctcaatttttcgagccaaaaagatttctgttagtttgcgttttaatgttctttctggacttaaataatagttctttgcgacctgcatcgtgatggttgaaccaccagtttgtacatcagaacccgtaacactttcactcaaagcacggcctaaacctttaaaactaatgccgctatgttcaaagaaagaagaatcttctgctgctagaaatgcatgaataaaattaggaggaatttgtttgtattcaaccggaatagaaagtttgccaccgtattcagcaatgagttgattgtcggctgtatagacttgcaatggttttaaaagcggtgctttttttagtgaactcatttccggaagcgttggggcaatatagagatacatgccatagaatcccatcggaagtgagactaagataataataatgatcaaaaaaattggacgcacgaagcccaaactggatagctttttcatgataagtaagctttaataagatcgaatacaaactaattgtggtcagtatagcctttagacatgcggattgttagatgagatattgtatccgtgtaaaaataaagaccgagattattggtttgtaattttttttggggataaaaaaataataggacaatagtgtgctcaggttatatcgtaaacctaataaggggttaatgggtgtcgatattagttcgacttctgttaagttgttagagctctctgtcaagaacggtaaatattgggtagaaagctatgctttgatgcctttacccgaaaacagtgtagttgaaaaaaatatcttaaatccagaagcagttgcagaggctttggaacgggcgatgaatttagcaaatccccaaaccactcatgctgcaattgctgttccgacatcgacggttattcataaaactatcgaaatggatgcagatatgagcgatgacgaacgcgaagttcagattcgtgtagatgcggagcagtatataccgttccctttagatgaggtgagccttgattttgaggttttgcccgatcgtcttgcgaatccaaatcgtgtaaatgtactcttggtcgccacaagaacagaaaacgttgaaacacgcgttgaagtgcttgaattggcagatttaaatcctaaattggctgatgtcgaaagttacgcggttgagcgcgcttttagcgtgtttgctgatagcttaccgatgggtgcaaataccatagggattttagatatcggccataccatgacgacattatctgtcatgcaaaatggcaagattatttatacacgagagcaggtctttggtggcaagcaacttacgcttgaaattcaaagtcgttatggcttgtctttagaagaagcaagccgagcgaaaaaagatcgctctttaccagatgattatgaaattgaagtgctagacccatttctagatgcggtagttcagcaggcggcccgttcactacaatttttcttttcttcatcccaatttaacgaaatagaccatattttgctagctggtggaaatgcgaatattccaggccttgccaagcttttgcagcaaaaattaggttaccgtgtcacgattgccaacccgtttttacaaatgggcttttctcctcaagtcgacgttcaaaaaattgaaaatgatgcttcatctttaatggtggcatgtggcttggctttaaggagttttgattaatggcaacaattaatttactgccttggcgcgaagagctgagggagcaacgaaaaaaacaatttataacgttatgttttggggtggttgttttggggattacaaccgtatttgggggatggttttattttgaccataaattagatgatcaagagcaagcgaatcagctcattatgagcacaaatcagaaccttgatcagcaattaaaaacattaaacggcttacaggaacagcgtgatgccattattgaacgcatgaagttgattcaaggtttgcagagtcaacgtccagtagtggtaagacttgttgatgagttagttcgagtcacaccatcagctatgtatttaacgaaatttagccgaaccggagataagtttacgattgaaggtaaagctgagagtccaaatacagtagccgaactactccgtaatcttgaagcatctccttggtatcgtaatgcttttatgaactctttcttggctaatgaagagaaaaaagataaggctgcaagttctcttcttcctagggtggaagaccactatggtagttttgttgtgactgtcgatttgggggaaatgggcgtgaccacaacggatgattctgctaagccatctacaggtgaaagtgtgggggccgctaaatgagtcaagacgaacttcaagaattgtcattagaacaattatctgcaaagaaaaagaaatttaatctcgataaattccttcagcaatttaatacgctggatatgaacaactacggtagttggccaatatctgtaaaaattacgtgttggatttttattttctttgctgtgttagctttggggtatttcattgttattcaaccgaaattacaagctattgataatgctcaagctcaggaaagcaatttattaaacgaatttcgtgaaaaagactcgaaattacgtaacctgcaacagtatcaggtgcaacttcaagagatgcaggcaaatttcaaccagcaactagagcagttaccaaaagaaactgagattccgagtttagttgaagatatcaacttaacaggagtgaactctggattgaaatttaaaaatattcgcttggaagatgaagtaaagcaggaaatttttattgagcaaccaattgccatagaagcgaccggggactatcacgcatttggagcttttgtaagtagcatcgctgctttgcctcgtattgtaaccatgcacgattttactgttgatgtatcgccagctaaagataacaagtctgatattcctgtgctgaactattccattaaagcaaaaacataccgatacgtaggggcaacagatacatcggagcaaacaggcaaagctccagcagcatctgcttcaacgaacactactgttcagccgaaataggagagttatgatgaaaattaagcaaattactctttatgttttggcgtgtgctgtgcttgtcggttgtgattcaagaattgatgcagtaaatcaggaaatggccaatattcgtaatcagccgccactccctattgaaccagcaccgatttttactcctgtaccacaatttaattacgctgctcatcaattaaaaagcccatttatgccaagttctctagctgccgagctcaagattatggcggggaaacgggtttatccgaatttctcacgtgcgccgcaaccactcgaaagttatgcacttgaagctttaaatatgaaagggagcatgcgtaataatcgagggcagatattggccctgatccagacaccggatcagcagattgaacgggtacaagtgggtaactatatgggcatgaatcagggccgtattacccatattagtccaacccagattgatctggttgaaatcgtaccagatggtcgagaaggctatgtcgaaagaccaagaacattggtcttgattgggcctgcaccctaaaatttagggaataacaacgaaaaaatatttttaaagattatttaatttaattggggatggtcagacaatgaatcacgtattccgtcagttttctatgggggctgtagctattgcgattatgcaggctgcatctgcacaggtcagcatgaccaacattgtaccaatgcaaattgcaggtcagggcacagaaattagagtcatgtttaatggcttgccaccacaaccacaagcttaccaacttgaaaatccttcacgtttaatccttgattttgataaggcacagcaaggtttaaaacaatctaaaattagtgttgcaactaatgaggcaagttctgtagatgttacttcagatgaccagcgctcacgtttaactgtaaacctaaaagatgctggagcatttacaacacgagtcgaaggcaatactttcattttaaaaattaattctgctcaaacaagtaataagccgctacctgtggtctcagcacaaccacagggagtttcaaatattggctttcagcgtggtagtcagggagaaggcctggttgttgtagatcttttaggaagtaatacgcctgtagatgttcagcagcagggtagtaaagtcgttataagaacaataggtacaaaaatcccgacacatttagcgcgtcgcttaaatgtaaatgattttgcaaccccggtttcaagtatcgatgcttataatgataaaggggttggtgtaataactatccagtcctctggtagctatgaatatatggcctatcaggcggagaataagctcacgatcagtttgaaacgtccccaagataaaaatgttacctctttatataaaacgccaaattattcaggaaataaactttcattagacttccaagatattgaagtacgccgtgtgttgcaattacttgctgattttacaggcatcaatatggtagctgccgatagtgtacaaggtaatatcacactacgtttaaaagatgtaccttgggatcaggctcttgatattattttaaaaactaaaaatcttgataaacgccgtaatggcaatgtgatttggattgctccagttgcagaattgattaaagcggaagaagaagaagcgaaagctgttgcacaaagtgtcaaacttgcacccttacagactgagtatattcaactgaagtatgctaaagctggcgatattatgggtctcattacacaaggctcaaataatagtaatggcttacaacatacttctggtggagggacctcaacttcaaccaatttaaatactggagttgatagtctaggcaataatgtgggtagtttgcttagcccgcgtggcactattactcaagatgaccgaactaatactcttattattaacgatactgctcagtcaattgatcaaattcgtaaaatgattgacttgcttgatgtgcaagttaaacaagttatggttgaagcacgtattgtgagagcctctacgtcatttaccaaagaacttggtgtgaagtggggtattctgtcgcaaggtattaccaataacaacaatttgctggttggcggtagtgaaacaactttatggaatttacgcgaacctaaaaaagatgaaactacaggtgggtataaatatacgattgagcgcccagataacttaaacgtggatttaggagtttctaatcctgcaggaagtattgcttttggcttgattagtatgtctgactttatgttagatcttgaattgtctgctttacaagcggatggttatggtgaggttatttctacccctaaagtcatgactgccgataaacaaacagcgaaagttgcaactggtcaacaagttccatatcaatctacaactaactctgcagcaggttcaactgctacaacatcttttaaagatgctttgctgagtttaaatgtgacaccaagtattacacctgatggcaagattcaaatgaagttggatatttctaaggattctgtagcgggtgcggctccaaatggagagttgattttaaataaaaataatatcaacaccaatgtattggtagataatggcgaaactgtcattttgggtggtgtttttgagcaaacaactatgaattcacaaaccaaagttcctttctttggtgatattcctgttgttgggcgtttatttagaaaagatgtaaagtctgatgataaacaagagttgctgattttcgttacaccacgaattgttaatgacactttagcgagaaatcattaatatattttttaatgaaagcaattgaaataggtggcgccttgccaagcaaagcgtttgaaaccctaccaaatatttatttggtagggcccatgggggcaggaaaaacaaccgttggacgtcatttagcagaactattagggcgtgaatttttagatagtgatcatgaaattgagcgcaagacaggggccactattccctggatttttgaaaaagaaggagaagtcggcttccgtacgcgtgaaactgtcgttttaaatgagcttacttcacgtaaggcattagtgcttgccacaggtggcggtgctattactcaggcgcctaatcgggagtttttaaagcaacgtggaatcgttgtttatctatatactcctgtcgaattacaactacaaagaacctatcgcgataaaaatagacctttattacaagttgaaaaccctgaacaaaaattgcgggatttattaaagatcagagatcctctgtatcgtgaagttgcacactatacgattgaaacgaatcaaggtgctgcacgtgatcttgcccaaaagattttgcaacttattctatcgaacaagttaaaatagacgaactgactagtggttttataaattcatgcaaactttacatgttgaattaggcgaacgccgttatcctattttcattggtagccaacttgacccgaaacaattactagagccttatattcatggtcaacaggtcatgattgtgagtaatgttacggttgcacctttatacttaagccactatcaggaagctttggaaagtctaggtaaaacggttgcgacctgtattttacctgatggcgaaaagtataaagatattcagcatttaaacttaatttttgatgcattgcttgaagctggttttaaccgtgattgtacggttttagctttaggtggtggtgtcattggtgatatggctggttttgcttctgcttgtttccaacgtggcgtttactttgtacaggttcctacgaccttactttcacaagtagattcaagtgttggtggaaaaacaggaattaatcatccgcttggcaagaatatgttaggtgcttttcagcaaccacaagttgttttagctgacatggcacaattgaatacattgccagaacgtgagctttcggccggtttagccgaagtaattaaatatgcacttttgggtgatgaagatttcctggtttggcttgaagaaaatatggatggcctagttgcaagagatgctgaccttttagcagaggctgtttatcgttcatgtgctcacaaagcccgcattgttgccaatgatgagaaagagcaaggtgaacgtgctttacttaacttaggtcatacttttggtcatgcgattgagtcatatctaggttatggaacttggttgcatggtgaagctgtagcaactggaatggttatggcggcagatttatcacaacgtttgggttggatctcaaatgaagatgtggcacgtacaaaaaaaatcattcaacgtgcaaatttgccgatatcatgtccacaaattccattggatgatttccttggatatatggctcatgacaaaaaagttcttaatgggcaattacgtttggtgttgttaaaacaactcggacaagctgtaattaccaaagactttgatgttgaacttatgaaacaagctattttggcgaatcaacacggataacaaataaggtaaagcatgactgtatcacgtacactttggcagaatgttcaacaatatatctggttggttggtggtattgtctgcttattccttgcttttattttttgggtcataactgataataaaaaactggttgaggttgaaaagtcagctgattccgatgcacccgtacaaattcagccagagaaagttgcaaccactcctaacttaggtgctttagctgacgaggttcgtccactggatttaacaacgcgaactgtggcgtcaggtgaacatgagcctgagtttcgtggcacaaaatttattaatgaaaataaaaaacaatggacgcttgagttattcagagcttctgatgaagacatcattaaaaactttttaaaaagtcgtactgatcgtaataagtttatttatttccgcttaagcggagaacaacaagcagaacaatatgtgttggcttacggaacattcaaacgttcagaagatgcggttcagcaattaacacagattaatttgcagttacctgattcagttaaacctcagccacagcagttctcaagttatgccccactggtaaatgatttgggggcagatgagatgaaaggtggcaataatcagttatatgaagttagattgcgtccagcggctttgcctagaattgatgaatctttattaatgtctgctccagcgagtggtaccctaaacactcagccaaaacctcctagtactaactcggctacaaaaactactattgtacgtcgtgatgcggcaggaaatgtggttgatgtacaacaatcgaattctaatattgatcagccaaataaacctgcacagacacggattaatgagaatcaaccaaaaaatgctacaaatgagggcacaagagggaactaaatcaccttaagttgtgctctaaaatggtgcaaatataaggcgtattaatattttttgaccagatgtggtgcatatttagtcattttttcacatgataacgtgaataaaataattatatttataataaatataaagatttaggtctatttttctattttggcacactttttgctttattgttgtgcttattaatgtgctgcaaactattttagcctctaagaagtgaattctatgcagagtcgtggggtcgaactgctttaaaagagtgcgaaataagtcaaaacatttttctagcaaaaaccagtgtacgtaaaaatggaacagcgtatattggcttatccgcccaaaatttttttttgcgaaacattgagctaactatcgtccataggcactattgcaaaaagaagttgtttgtttgacgctcgaaagagccttattgaaagaagggtacgctatgcacatgccatcgcctaatactgtagctcccgctcaaggtttatatcagcctgatgagtttaaggataactgtggttttggactgattgcccatatgaagggtgaatcaagtcatcatctagtagaaaccgcgattcacagtttaagttgcatgacgcaccgtggtggtattgccgcagatggcaagacgggagatggttgcggcttattattggcgatgccaaagcaatttttccgtgatgaagcaaaaaaactgagtgatattacactgagtgaaatttttgcagtgggtacggtatttttaaatattgatccagcattagcacagcattctaaaaatattttaacgaaagaaattgagtcagaaggtttacgtgtacttgcttggcgtatcgttccaacaaacaacgatgcattgggtgaaatcgcgcttcaatctttacctgcttttgagcaagtcatcgtcaactgcccaatgggcgtaactgaggttgaatttaaccgtaagttattcttggcgcgtcgccgtgcggaacaacaactccaaaatgatccgttattttacgtgactacgctttgctcgacagttattagctataaaggcttaatgatgcctgcggcgattgccgagttttatacagacttggcagatgagcgtttaaaatcacatatcgtggtattccaccaacgtttctctacaaatacattacctcgttggccattagctcagccattccgttatcttgcgcataatggtgaaatcaacacaattacagcaaaccgtaactgggcattagcgcgtactcctaaatttgaaaacccattattgccgggtttgactgagcttaacccgattgtaaaccgtacaggttcggactcttcaagtttagataatatgcttgagattctggtgggcggtggtatggatttattccgtgctttacgtatgctcgtgccaccagcttggcagaacgttgaaactttagatgcagacttgcgtgcattttatgagttcaactcaaaacatatggaagcttgggatggtccggcaggcctcgttattcaagatggtcgtcatgcgatttgtatgcttgaccgtaatggtttacgtccagcgcgttgggtaattaccaaaaatgattacattaccttggcatctgaaattggtgtttggggctatgagccagaagatgtggtatcaaaaggtcgtgtaggtcctggtcaaatcttggttgtagacacccttacaggtaaagtgcttgatactaaagatgttagcaatcacttgaaaaacatgcgtccgtaccgtgagtggttgcgtgaccatgcgattcgcttaaatgcaaacccggaacttgaagaacaacttgttgataaaggtttaactggcgatgcattaaaagcggctcaaaaaatgtttatggtgacatttgaagagcgcgatcagttgttacgtccaatcgctgagagcggtcaggaagctgttggttctatgggtgacgatacaccaatggctgtattgtctcgtcaagtacgtcatgtgaccgattacttccgtcaacagtttgcacaggtgacaaacccgccaatcgacccattacgtgagtcaattgttatgtcacttgaaacctgtttgggccgtgagcagaacgtattcgaacaaggtcctgagcatgctgatcgtatcatcatctctagcccggttttatcaaattcaaaaatgcagcaaattcgtagcattgaacgtgcaggttatgaggcggttgatattgatctgaactatgctgaaaccgaaggtttacaagctgcgattactcgtatttgtgaagaatctgcacaagctgttcgtgatggtaagaccttaattgttttaactgataaaaacattcgtcaaggttatttacctgcaaatgctgcgcttgcaacaggtgcggtacaccatcacctcataaaaactggtttgcgtactgatgcaaacattatggttgaaaccggttttgcacgtgatccacatcaatttgcggtgttactcggttttggtgctactgccatttacccataccttgcatatgatgtaatcaatgatttgattgctaaaggtgagcttttaggtgatccaatccatgcacaggcaaacttccgtaaaggtatcgagaaaggcttattaaaagttctttcaaagatgggtatctcgacagtagcttcttaccgtggtggtcagttatttgaagcagttggtttatcttctgaagttgtagatcaatgtttcttaggtgttcctagtcgtatccaaggtgcaacatttgttgatcttgaaaatgaccagaaaaagttagcggctacagcttggtctaaccgtaaaccaattgatcaaggtggtttgctgaaattcgtatttggtaaagaataccacgcgtttaacccagacgtgattaactcgctacataaggcagttcgttctggcaaatacgaagactttaaagaatatgccgagttagtgaataaccgtccgatcgcgactattcgtgacctgtttaagttaaaaacaaccaatccaattccggttgagcaagttgaatcggttgaagctatcttgcctcgtttcgactcggcagggatgtctttaggtgcactttctccagaagcccatgaagcaattgcaattgccatgaataccattggtggtcgttcaaactctggtgagggtggtgaagatcctgcgcgttacggcacaattcgtaactcgaaaatcaagcaaattgcatctggacgttttggtgtaacacctgcatatttaacttctgctgaagtcttgcaaattaaagttgctcaaggtgcaaaaccgggtgaaggtggtcagttgccaggtggtaaagtgaatggcttgattgcacgtttacgttactctgttccgggtgtgacacttatttcacctccgccgcatcatgacatttactcaattgaagatttgtcgcaactgatttttgacttgaaacaagttaacccgaaagcaatggtatctgtgaagttagtatctgagccgggtgtaggtacgattgctgcaggtgttgctaaagcatatgcagactttattaccatttcaggttatgacggtggtactgctgcgtctccgctttcatcaattcaccatgcaggttcgccatgggagcttggcttgagtgaagcgcatcaggcacttcgtgtaaatgacttgcgtggcaaagtacgtgtacaaactgacggtggtttaaagactggtcttgatgttattaaggcggctattttaggtgctgaaagtttcggttttggttctacaccaatgatcgcattaggttgtaaatacctacgtatttgccacttaaacaactgtgcgaccggtgttgcgactcaacaagatcatttacgtcaagagcactatattggcgaaccacaaatgctcattaatttcttccactttattgcagaagaaacgcgtgaatggttggcagctcttggtgtagcttcacttaaagacttgattggccgtgtagatttacttgaagtcttaccgggtgaaacagagaaacatgctcatcttgatttaagtgcattattaacttctcatcctgctgctgaaggtaaagcacagtattgtgaagtagaaggtaatgcaccgtttgacaagggcgtattggctgaaagaatggtcgaagaaatgcttcctgcaatcgagtcaagcgctggtggtcaattcaattttaatgtcgtgaactgtgaccgttcaattggtgcacgtgtatcgggtgagattgctcgtcgctatggcaacttgggtatggaagcacatccggttgtaatgaacctaacaggtactgctggtcagtcacttggtgtttggaatgctggtggtttgcacatccgtcttgaaggtgatgcaaatgactatgtaggtaaaggtatggctggtggtcgtatttcgatcttcccaccaaaaggttcacctttccaaacacaaaatacagcaattattggtaatacttgtttgtatggcgcaactggcggtaagttatttgctgcaggtacagcaggtgagcgtttcgcggttcgtaactctggtgcgtttgctgttattgaaggtgcaggtgaccactgctgtgaatatatgactggtggtgttgtgactgtgcttggaaaagtgggtcataactttggtgcaggtatgacaggcggttttgcttacgtgcttgacctcgataatgactttgtagattactacaaccacgagttaattgacttaacccgtatttcaacagaatctatggaagatcataaagaattcttattgcgtattattgacgagcacatcaaggaaacaggtagtgcttgggcttataaaatccgcaatgagttcgatttctacagccgtaaattctggcttgtgaaacctaaagctgctaacttgcaaacgcttttgaaaacaacacaagctgacccacaataattccacgactgcaaagacataggcaggtgcgggcaacaaggaaatccgcgcctacccacggagagagacatggcagagcgcctaaataatgactttcaatttctggatgtaccacgtcaagatccagagaaaaaagatattactgtccgcaaagcagagtttgtggaaatttataaaccttttacttcggaaactgtaaccaatcagacgcaccgttgtttaggttgtggtaacccatattgcgaatggaaatgtcctgtacataactacattccaaactggctaaaactcattgctgaaggccaaattttccaggctgctgagctttgccatcaaacaaatactttacctgaggtatgtggtcgtgtatgtccgcaggaccgtttgtgtgaaggtgcttgtaccttaaatgatggctttggtgcagtaactattggtaatgctgaaaaatatatcaatgacacggcttttgctttgggttggcgcccagatatgtcacatgtgaagtggacaggtaaaaaagttgcaatcattggtgcaggtccagcaggcctaggctgtgccgacattttagctcgtggcggtgttaaaccggtggtatttgacaagcgtcctgaaattggtggcttactaacatttggtattccagaattcaaaatggaaaaagatgtgatgaagcgccgccgtgaaattttcactggcatgggcattgaattccgcttaaatactgaaattggtaaagatgtcacgattgatgaattacttgctgaatatgatgcagtattcatggggatgggaacttatacctacatgaaaggtggtttcccaggtgaagaccttgacggtgtttatgatgcgcttgatttcttaatctctaacgtgaaccgttgtcagggatgggaaaaggacccaagtgaatacattagcatggatggtaagaaagttattgttcttggtggtggtgatactgcaatggactgtaaccgtacttcattacgtcaaggtgcccacgacgtaacatgtgcataccgccgtgatgaaagtaatatgccgggttctgcacgtgaagtaaaaaatgcgtatgaagaaggcgtaaagttcttatttaaccgtcaaccaatcgagattgttggcgaaaatggtaaggtaacaggcgtaaaagtggtaacgacacaaatgggtgaaccagatagtcgtggtcgccgtagccctgagccaattccgggttctgaagaagttttaccagctgatgcagttttgctagcgttcggtttccgtccaagccctgctgactggtttggtagtgtgaatattaatcttgatggttctggtcgtgttgttgcacctgaacagcaggaatttaaattccagacttcaaacccaaaaatctttgctggtggtgatatggtacgtggttcagaccttgtagttacagcaatctgggaaggtcgccaagctgctgaaggtattttagattaccttggtgtttaatctaaaaaatcattattaaagtttttgataaagcctgcgatatgcaggctttattttttttaccattagtcagtttgatgcttttggcaaatacaataagcttttttgccctgtttagccccttagtcgcaagagatactcaaagcttccttcttcaatacaataggtgttgaatatgaatatcgcaggtatgacggcagaaaaatcatatttaaatcgtcgaaaagcgttgggtattattgtgcgtcgccttgagtttaatcctcaagctatcaaacgctattattttgcaaattcgcctttaatgtcccattttttaactgcactctcttcaacatttcccgtaggagaacagttttttgtaaatagcgtgcgtaatgtacgtgacaaagtttccgatcctcaactacaggctcagattgcggcatttattgggcaagaagcaatgcattcgaaagcacatggagagttcaatgaggcttggcgtcgtgatgactataatctggatcgctttcaaaactggttgaatgagcgtgacaaatatttaagaacaatttctcctaagctgcagctagcactgacatgtgcatttgagcattttacggctttgctggggggatatattttacagcatccagaacttctaaaaactttggatcaagatgcgctaaagctttgggtttggcatgctatagaagaaattgagcatcgttcagttgcattcgatgtctatcaacaggtatatggcgatgaccgtattcgtcgtttactcatgcggagtgttactacagggtttgcaagtcttgctttttatggcactacacggctattttggcaagataaatggaagagcttgcctaaaatcggaggtaacttatttgggctatatttgcttgctaaaatgcttatacagctaactcctgaatattttgcttattacaaaaaagacttccacccgagtcaaaaagattatggccatatggtcgattattggaaaagttatttggctgatgaatatcaaatggcaagtttccaagaggaaaaaaatccaagaccaagctaataaaaaaccggatttaaaaatccggtttttttaaatctataaaataaaagcaacacaataatgccaaaatcgtcatacaatcgggaaaagtggttaaaaatataaagaaaaacttgaggataatgtgacgatgaaaacgtttaaacaacttgctatcgcgacaacacttgccagtaccctattattttcaggctgtggctataatactttacaggttaaagatgaagctgtaacagcggcttggtctgaagtacaaaaccaatatcaacgtcgtgccgatctagttccaaatttggtaaatgttgtaaaaggttatgctaaacatgaagaacaggttttaacagaggtcactcaagcacgtgccaatgttgcaggcttgaaggttgataaagaagtattagaagatccagcattacttgaaaaatatcaacaggcacaaagccagttaactggggcattatctcgacttattgctgtttcagaaaactacccggatttaaaagccaatacccaattccaagaattgcaagttcagcttgagggaacagaaaaccgaattgctgttgcccgtaatcgttatattacaactgttcaggactataacgcttatgttcgtcagttcccacaagcagtaacagcaaaagtgattggcatgcatcctaaagccaatttctctgcagaagcatctgctcagcaggctccaaaagtttcttttgattaatttaaatcaaaggagtgccgcatgagaaatactatattgcttcagcctaagcaaattagggtattcgttattaccttaattgttctctgctgtggtgttctgtttcagaatgcggcttggagtgagaataatattgccactgctaccgatgaaacggatacggtagtggcaggcaaaattattcaacagcagcaagctcaagcatctaagcctcaaataaattctcaggcagcttcgagtgtcacacctcaaacgcaagttgcaaatgatatggctgatggtgaatcaattcgtggtttaccaacattaaatcaacctgtcattgatcaagctaacgttttgagtgaaactgaaaaacaacagcttagccagaaaatcttaaatctgtaccagcaaggtaaagcacaaataggtattgtgattgtaccaactacaggtcaagaagatatttttgattatgctttgcgagtaggtgaaaaatggcaactcggttcgagtaaacgagataatggcttacttatcgcagttgcaattaatgaccatagaatacagattctaactggatacggtttagaaggggtattacctgatattgttgcaagtcgaattattcgaaatcaaattaccccttattttaaacaagcccaatatgctcaaggactaaatgcaggacttgatgaaattggaagaattttaaatttagatccggaagttgctcagcaagctgctcaagatttaaaagaacgccaacatcaagctgccgaagaacaacaagccaaacaaacaacgcttacaatggctttatttattcttgttgctggggttgtgggatcatttattgttggtcgaccacttagcgcgtcaacagcaggagttgcggcagcggtagctggttttgtaaatggtgctggcgtagtaatgagtttactactgggttttggtattttctttttactcataacttcaattgcccaactgattttacaggctattctgagcggagctggtggcggtggacgcggaggaggctttggcggtggtggcggaggctacggcggcggcggtggacgttttggcggtggaggtgcttcaggctcatggtaacaacatcagaaacaacccaaattattactcagccaaaaattgaggaatatgtagagccaagtttaaaacgttggtttaagcatttttgttatttaccagcaagtagcaaatatttctccaaacaagataaacaagctattgctgaggctgtacagcaagcagagcatgggcatgttggcgaaatacaggttgtcatagaaggccatatcccatgttcacaagcgtatagacaaaatacccgtttaagagcccagcaattatttgcagaactgggtgtttgggatacagagctcaatagtggtgtattgctctatttaaatttgtgtgaacgtacagtagaaatcatctttgatcgtgggattagaaatgcaactactgaacaaatatggcagcagatttgtaagtcgattgtagagcagcttcaacaaaagcaatatcagaaagcagtagttacaggagttcagcaaattggagaagtgatgtcacgcttttacgatgaaaacatgccagatcaattaaatgaattaggtaacgcacctatcattattaattaaatgattgactcaaaaatttagttgtttttttaaatttttgctcaataaggtggctgacaaaaaatgtcacctatttgattatttttatagagatttttatcacattcgatattaaaaaaatgaaataggcaataaattaatttttatcggtgatttaattctactaaattcctagtgacaatttttgtcagttaattacagcttaaactactaaaataaggctttataaattataagtttatgttttttaacaataataaaagttggcatggttgctgcaatatatttgatagctgaaaagcttatataaaaacatacatacaatctttggggaaaaggctatgaatgcacaaaaaggttttacattaatcgaacttatgatcgtggttgccattattggtattttggcagcaattgcgattcctgcttatcaaaactacattgctaagtcacaagtaagtactggtttagctgatattactgctggtaagacaaatgcagaaactaaattagcagaaggtttaactgcggcattaactgatgtaacaactttaggtttacaacaatctacgaatgcttgtgctattacagccaatattggaactaatggtgcaagtaatattacttgtacattgaaaggtacatcacaaattaatggtaaaaaaattgaatggatccgtgatgcagataatgctacaaatggtacgacaggtgcttggcgctgtaaaactgatgtagctgaaaacttacgtcctaaatcatgtggtgcttcttaatagttaattaataaaaagagaggttgcggcctctcttttttattgaagaaaataaatatgttaaagaaaaatattttactgtttgtgatagtaatctatcttattacagcactattgggatatcgaattggctggtctgtctttcaatatgatgaacttcgtttattgcagtttcctttagcgttatgtgctttattaatattaatctccgcaaaaaaactaaaatactcaatttatagtcaaattaatttttttattattggggtatttatattaattcaacacataaattggggaatttttgagtttcaagagctttggtctgcgatagcattactttttatattttctgccttaacatatgagttaaggaatataaaaaatatagagcatggtattgcactaattgtagttacagcaattattccatgtttatttattttgatttctatttttaattttattatccatcaacaatggtttgattggcagtttaactctggcacgattcggatttatgatagtgttattgttcccttgtttttcttcctgatttatctaaaaaataagaaatatccttatatctcttatttttaccctatagtaattttcttttttgctttagcatggttttttgatggagctaggtctgctttacttgcggtaatgacaggattgctagttctctttatatattctaaagaaaatcgaaagcttattttgcaaagctgtatttatatttttttagctttttttatttataaaatcactatttttttagctgaaaaaaatacaatgactgtaatacgaacgggaacatcgctgcgcgcagaaatgtggaagtttgtatttaaacaatggaaacagcacccatttactggggttggtggtggatacttgtctaaaatacagtatgcgtatggacatcatatacataatctatatttaagacttatttttgaatggggcattataggtctcatattctgtatatggatgttgacccaattaattggtttatttaaagataaaactgtttcactaattttgaaagttggtgtgatcgccgttttagttgatgcaatgttctcaggtagtatggtgtacccagcgtcacaaattgcctgtgtattatttatagcttttactttttctcatagagagttaacttctagttcccaatattcttctaggtcgacaaaaatactgattgctttatggggagttttattcttatacatcacaataatgtatttagggcaagatttaacttgttggagttgcggaagctatggaggacgaatggctccaaacttttggttttatggtggtgcggagcacttagtaccagcttcaaaaattccttaacttttgaagtaaactttatcaagtccttttcatatagacttcatacatttttctttagggttccatgtataatttcacccatttctaatagtctcaaacctgtcactatgcaagtattctttctgttcctcgcagcaattctattgggtttcgcatggctatcaccatttcactataacccttgggtaatgttttctagtgaaatgagtacttttgcggcaggtttaagtgtcttagctgcacttttttatcaaaatattaaaattccgcgtgcacaattattgctgttgccatttattttaattccagtggtgcagtgggcttttggtctagtttttgattttagtacagctttgttaagttcactttacttattaggcttctggtttatggttgtggcgggttataacttgtcactagatcaacaaaagcgagatcaaatttttacaggctttagtttattactgattattgtatcaattgcgaccagttttattgcgatatgccaatggttaaatattgagtctcattttgtgcatatgttgcatttaattggtaaccgtccttacggcaactttggtcaacctaacaatatggcaacctttctgattatggggctattaggttgtctatttttatatgaaaagaataaagcaacagtttggttacttttcccttctgcactcattatcttgtttacaatcgctttaagccaatcaagaacgtcttgggtcgtttttccatttttacttatctattggatagttaaactatttggaaaacaaaaaagatttggttttattcaagggttcttgtggtgcgctggtttttttgtaatagctggcgtgattctgccatttgctactagtttaattgaagcatggtcgagcgctgatgtagcccaagcaagtagtttagttgaaagagcaagctctggatatctacgttttaatatctggacccaaatgctacttgctgtacagcaacatccttggttggggtatggttggaaccaaaccagtgtagcgcaaatgtcagcctatgctctttttccaacaactgagtggacgaccagtgcccataatattttattagatctcatcatctggaacggtatcccaataggtatagccattattgcttactttgcatgttggttcctttggctaaaccagcaggctaaagaaactatctcaattattgcaattatgatggtgtgtaccgtactcattcatgccatgttagagtttcctcaacgctacgcttacttcttacttacttgtggattcttattaggcataattcaggcacagacacctgtactcaaaggtattgtgctcaacaagcaggttcttcgtttaatttggggagtcagtttaatacttctgctagcaatttggcgtgactataatgtctatgtcacaaatagtaatttgttgtttaagaataaacagccaaatgctgaggttttgggaagtaatcagatttttgttttaacgcagtttgagcagcgtctaaaatggattgagatgaagcctgaaactactttatctgatgctgatttagcagtgtggggtaattttgtgaagaataaagcgacgccttataacttgcgtaaatatgcccagctacttgcctataatggaaaagtagaacaggccgagcaacaaatatttattttgcagcatctttatcgacagcaaataactttggcagagttgttaaaagataaataaaaaaatccccttgaatacaaggggatttttttatgagaaattacatttggctttgaatataattttcgataccaacactgccaataagatcaatttgagtatctaaccaatcccaatattcttcctctttttctaagatttcttgtaccaaatcacgcgttacatagtcttgttctgtttcggctaaagcgaccgctttttgaattgcttcaatattttcttttactttacggatgtcgcattgcagaacttcttctgtatgttgaccgatatacaatttacctaagtgttgaagattagggagaccttctaaaaataagatacgctcaataattttgtcagcatgcttcatttggcgaattgattctttatattcggcagaaccgagttgttcaattccccaatcattaaacatacgagagtgtaaaaagtattgattaattgcagttaaatgatgatacagcacttggttgagctgattaatgacatcacgattgcctttcattgtagctactccaaaacaatttctgccttaattcagttaaggcaatctataaattcattttagtgaacaatcatggatatggcgagtaatttatagaacagcaaatgaaaatcgcaatcaaaaacaacacaatattggtaaatgtgaatttccttccaaaaaaaaccgcttcaatgaggaacatttaacgttccgcaaaaagcggtggaggagtcaataaatttttgttaattattaatttttattatgcagctacagaaatgcgcgcagcaatttctgctaattcttcactaataatagcacgtgcttctggtgcacagcgtccacagcaagtaccaagatcaagcaaatcgcgaatttcacgatagctttcagcgccattttcaatagcgtctttaatatcctgatcggtaatgccacgacacaagcaaacgtacatgggagtgatccccaaatataaatgcgataattgatattattgataattattatcgtttgtcaatgaaattcatttaaaatctcatttatcgttattgggattttggataaaaaaataccacctaagcggaaatctgagagttactcagctttttaagctggggtggtatctaattttagagctaaataatttctagttaatattttatcttactgattaataataacaattccatccatttcaactaaagcccctttaggcaggcttgctacaccaagtgcagcacgagctgggtatggttgagcaaaatattcgcccataatttggttaacgagttggaaattagataaatcagtaagaaaaatattgagctttgcaatatctgcaagtgtgccgcctgcagcttcacatactgctttaaggttatcaaaaacacggcggatttgagcttcaataccgtctacaagttccatactgtaaggatctaaaccaatttgccctgataaatatagtgtgttacctactaaaatggcttgagaatatgtgccgatggcagcaggggcattttcagtatgaatgacttgacgggacatttggttctccttgattaaatcttttttcatcataatcgatgatacgttttgacaaaagtatcatcgatttaattgattaggtacttctagaagttagattttagtaaagcagaacaaattttagctgactttggaaatttccatttgtggagcaggggcgtctagacgctcaatacgtgggaagccatagtgcattcgtaaatcacgaatgacttttgcaatatgtttacggttgtttactacaatattgacgaaagtacgctgttcgttggaatgtaccatttctaccccagcattatttttacgacattggtagatgaggtctgatacctgttcatcattcattgccatataaatcgcaaggtaagcagtaaaacgtacatcatctacgtcatctgctttccattgaagcggcataatgttttctgggtgtaaatgttgttcatgaagcaaattatgacaacgaatacggtgcacaattaaaccacgtcgtgttaaatggccttgaattggatcgcctaaaataggattacaacagtgggcatatttaacatcaatgccttcagttccttgaattagtcgatctgaattttctgctcgaggatgcttgtcatttgcaaacaaatggttagctacaagttgaggaagtaaatctccaacagcaatttgctcaaataatgcatctttattatcaatatgacgccattgtaaaagatctaaccaatctgcatctgaaaggtcgttaatagaacgattaaagagtttcaaagctcgtgaaagtgcttgggcaccaactaaacgttgttcttcaatatcttggtctttgagtacgtgctgtaaagcacggcgagctttttgagtattaataaagctcagccaatctggatttggcgttgctaaaacgtcagtaataatctcaataacctgcccactaactaatggtgtagaaagtggcttaatttcaccatcaacttttgcacctaccgcatggttgcctaagaaaagactagctgagtaggcaaaatcaactactgtggcgccttgtggtaattcatgtaactggccgtgtggtgtgtaaacccaaattttttcttgatgcaaataatcaagtaagtcattaaaagtcgttttagcgcattcaccatcaatgagtgtatttaggttctgcatggaagcttgaatggcagagcggcaagtttgtggagcattttcgccgagtacgacaccgaaacgtgcagctttacgcatcaactcagtttgaatagtgagcgataacgtggttttttcacccttaagcttgatcattagtgactgattaccacctggtaacgggcggcggatatgatcttgatattggatgacctgaaaattttcttttaatgctgctactaaacgatcgcagtctgcaatggattgtaaaacgatttcaaaggcatggctatgagtaagttcttgtaaatccatttcattttttacgaaatggcgtaagagctcaatattattatttttctttttaattcgaccttgaatatgataattgtggagaagctctgcaagattttgttcccagatactttggtatttacatcgctctggtttggtttgaagcaacgcattttgaacgttatcaaacatatctaaatcgagattttgataacataaattttcaaggttatcggccatttcattcatgccgactaatcttgccatcggtacgaaaatatcaaaggtttcttgagcaatacgagcacgtttatcgggacgtaaggcgcccaatgtggtcatattgtggtagcgatcagctagtttaataataatgacgcgtggatcttgcaaagtagcttgtagaatttttctaaaagaagcagctttattatattctttatcgctcgactggcttagtttggttacgccatcaacaagctctgcaactgtttgtccaaatcgctcaataatatcgtcttttgtatattgagtatcttcaatgacatcatgtaaaagtgcagccattaatgtttcaggatccaggcgcatattcgctaaaatacagctaaccgcgataggatgcagaatataaggttcaccacttttacgggtaataccagtgtgtgccagatctccaaaatcgcaggcagcaagcactttttcgacttcacttaccgataagtaagggtcgataattaatttgagctgttgcttggcttggctgacctcttcgcctggcatagaccaccctttttctgttgcttaaaaaactaaatctatctacttcttaatgaaaagcatattgcggaacttgtcaattttttcgtttgaaaaagtgtatttttttttcaatgaaaataattgcttttaccaatatgttttaaatatgcaaagccaaataaaaaaccatcgcaaaaaaacgatggttttttatagaaacaggagtaattagaaagaaaaaccttctaaatttaagctgtttgtagaaagggcaagatcaagactagaagtttgataatcttgctcacgttgtttaagaatttctttcgttacgtgacctacagcgatttcacgtaaagcaacaactgttggtttgtcgttatcccattctacagttggctccatgccttgacgtgccaattgacgagcacgtttacttgcaacgagcacaagctcaaaacggttgtctacatgatctaaacaatcttcaacggtgacgcgtgccataaaagttctcgttttggaatggtaaatttgaacagactaaatagtataaaaggctttcgttccagactcaagttattcctgttttggttgtggagtaatcaagtcttgaattagattttgatgtctttttgcctgttgagataagactaaacgatttgctgtaatgacggcttcaagctcatgtaaggctttattaaagtcatcattaatgatgatatagtcgaaatttacatagtgctgcatgtcttcaacagcacagcttaagcggtgttcaataacttcaacagagtctgtaccacggttagataaacgttgacgtaaatcgaattgagtaggtggtaaaataaagatctgtttagattcaggaaacagcttacgtacttgctctgcaccttgccagtcaatttcaagcaagacatcatgtccttgagctaactgttgttttacggttgcttgcgaagtgccatagtagttaccaaatacttcagcatattcgataaatccaccttggttcacttggtctaaaaattcatcttttgttgtgaagtgatagtgaacaccatctaactcacctggtcgttgacctcgggtagtatgcgaaactgaaacatgtaaattgctcacacggtcaagtagggctttcaccaaagatgttttgcccgttcctgatgcagcagaaacgacaaacaatagacccgacatgatatttttcctgatatgataaaatatcttcgctattgtagtgtaccgtgcgtttaaactgaatagttttaactgcaaatatttacgagaagttcccctgttttattaattttgaggctgttatggaaattgtgttagctaatccgcgtggtttttgtgccggtgttgatcgagccatagcaatcgtcaatcgggctttggaatgttttaatcctcctatttatgtacgtcatgaagttgtacacaataaatttgtggtagatgacttacgccaaagaggggctgttttcgttgatgagctggaccaagtgccagatgattctattgtaattttcagtgcacacggtgtttcaaaagcagttcagcaagaagcagagcgtcgaggcttaaaagtttttgatgcgacttgtccattggtgactaaagtacatattgaagtaactaaatatgctcgcgaagggacagaagctattttaattggtcatgaagggcacccagaagttgaaggtacgatgggacaatatgacaaattaaaaggtggcgatatttatctggttgaagatgaggctgatgtggcagcactcgaggttagacatccggaaaaattagcatttgttacgcaaacgaccttatctattgatgatacagcaaaagtgattgatgctttgcgtgcgaaattcccgaatattcaaggtccgcgtaaagatgacatctgttatgcaactcaaaatagacaagatgcagtacgtgacttagctgaaaaatgtgatgttgtgctggttgttggctcgcctaactcttcaaattcgaatcgtttacgtgagcttgctgagcgtatggggaaagctgcttatctagtagataatgcagatcaacttgaacaatcatggttcaatgatacttgtaaaattggtgttacagcgggagcttcagctccagaaattttaattaagcaagtgattcaacgtttacaagattggggagctcaggcgcctaaagaattagaaggacgtgaggaaaatattacttttagtcttcctaaagaattacgtattcatgtgacccaagcataaaatgtgacttatttaacatactgattttaaatagttaaacagataattgttaacatgacagttatctgtttttttataccctttgtctgttttgtatttgttttgtaatttgtaaaagtaaaatttaaataagaaataaaaaattttagttttatttggggttctggggatgaggggaattattccacaagaagggttcaccttggtcgagctaatggtgacgattgcggtcatggctattattgcactgatggctgcaccatcaatgtcaaatttattagaaagtaaacgtttagatgctaatcaaagagacttaatcaacactttatcagaagcgaaaagtcaggcaattttaggacgtcagaatgtttctgttaacttgaactcaacagcttcaaatacacccacttcattaaattggcagacagcttctaataatactcttgagctaaaaaatatagccgctgatggtacgcaaagttctttaacgactactactttagcttttaacgcaaatggagtagtggcaaatataactcaagatacgcttttatctatttgtaattctagaataaataaaaagaaagtcattattttgtccaagcttggcactttggtttttaaggccgaggagaattgttaatgcatcactataagcaaaaagcccaagctggggtgggcttactcgaagttttggttgccttaattttacttgctattggagttttaggttatgttgccttgcagctaagagctatggatgcatcttcagaagcattaagtaaatctcaagccattctagtgatgaggggattagcagaaaatatccgtacaaatagtactcaagctagccagtatcctacatttgtgcgtagttatagcaactatacatctgatactcctgcacccacgtcatgttttaactctctatgtactgcctcccaactcgctcaatttgatgcctatcaagcagctagaaatgctaatcaactgggtatgagaattacgatgtcaaattgccctggcgttacaaatacaatggtgcaacaacgccagtgcctatttgtcttttggggtagaactgcgccagtgattactacaaatggaacaaatactagtgtggatgtttcaagttgtatgagtaataacggtgtttacgtgaataattcaacttgcttaatgatggaggcatattaaatggctcaatcatttatttctaataaagaacaaggttttaccttgattgaacttatagtcgccttagctttaggcctaatattagtggctgctgcaacacagctatttattggagggcttttatcgagccgattgcaaaaggccaatgctgaaatccaggacagcggtatttttggtttggaatatatggcacgtgatatacggcttctaaattatggaaatgttgtaaatccacaattaacagatacaacgccttggggaggtattgtattaacaggttcaacagcaacaaatgccaacaatattaattttattccaaaagttgatacaaatacttatattccggaagcgttattaagccgtggtgcaggtgatacggtaagtacagtgaataactactggaaaggtctttcaaatatacagaatagttcaaatgctgaagtacaaagcgatcaactgactattcaattcattgccccgaccaatatgactaattgtgaaggtgtgaatgtgttagcgggggacctaatagttcaacggtattttttacgtgttgataataatggtagctctcaacaggattatgcacttgcatgtgatgcgaatacccctgcggttagtgctacagcgcaacctgatatcgttaatggattaggagatgcaggccaaattatactgcctcgtattgaccattttcatgtcttattaggtgcgaaaaacgcagctggtaattttgcttattacacaattcctcagtatcgggtggctgcacaagctgctcgagatgcgagtccagctgtggctgctccaagaattctgtcaatacaaatatcggtattagcccgttctacaaataatgctcaaaataaggcaatagaccctaatcagtcttttcttatgctagatcagaatgtgcatgctgccgataacagaactcgctttttgcgacgcgtatatagcgtgacaattgctttacgcaatgcaatgggggaaacaatatgacccatttaaattataaaaatattaaaggtcgatctaaggaaacgggtgccacacttattgttgtacttattattttattgattgttatttctgtcggggttttggcaataagagtagcgattgtttctctaaaagttgcaactaatagccaagttggccaattaaactttcaatcttcagatactccgttagagcttattgtacagatgaacccaaccacattgacaaatattaccaatgtgattggagcagcactgaaagcacatgaaagtaaccctggtgcggaatataacttttgctataaaccaacttctacatctgtaagttttgctcaaactcggggggcaagtttgcttcgagctggcagcgctaataatgctgtggttgaagatggtggagtagcaggtttctgcgatttaacaagtgactatgggagtaatcgtcaagcggtagttactcaagttgctgtcagtatcccaaccgatgccatggctgatattccgggttcaaatctacctcgggacataaatctttccgaaggaacccaacttcctaaaagcatgctatctacgcaacgtatccgggttattacaacagcgtttttacctgcttatgcctcaacttctttagaaactctgcaatctgattgcttaagtacgagttccgcaaaaattagtgacaactttgatagtgcattaacggataagcaaactctagctgattgtttggcaaaccataatgtaccttttagtactcaagttcaagaatttaactataccaataagctgactgaaatcacggcaccaggttcataatggggaatatcatgaaactaaaattgaagaattttaagccaaataatttgtggtatgccgtctattcaagctcaatgatattcacatggctaatgacaagctctgtggtgcaagcaagtgatttacaaatttatgcctcacctacagcaggtaaaaaaacaattgtgatgatgttggatacatcaggaagtatgaccaacaatagttatggtgaaaaccgcttagccatgcttaaaaatggtatgaatgcttttttggctagcaataaccctgtcttaaatgatacgcgagtaggtttaggaaatttctcggcaaatggtgatagccgaagtggacaaattttagtggctgctgctcctttaggtgatgcaagtactttaaatacggtaggctcacaacgttataaattaaaacaagctgttgctaatttaactgcgggaggctcaacaccttcagcccacgcttatgctgaagcagctgcttacttaatggggacaaccacatattcagagacgaattatgctattcgtaaagatagttatatcaaacgtgtaagaagatctgataatagaactgaatattcatattgtactaattaccgtgattcgcaaattgatacagccaacctatggcaaccttgtcgttcaaatagttattggagtagctggtcaacaaataatccaggtgtggataatgctactgcttatgatacttcatctgactggacttattactatacttattactacaccacttttaattatgctgtagcaaatgcagatagcggtattccaaaatctaaatcaaacgatacagctagcaatccgaatattgttgtagaccgaaatgctactaactccaatgcagtgtatcagtcacctttacctgcagtagcgaatcgccagagttgtgatgggcaaggtatttacttcttatcggatggcgaaccgaacaatacaacaaatacacgttcggcaagtgtcatgtcgactgctttaggtagtacttttggagctgattttaattgttctggaggtttatctaacactacggcagactctggttgggcttgtatgggggagtttgcaaaaagattatttgataaaacaaagaaccctgccggagtttctattcaaacagcatttgtcggttttggtagtgacttttctagtttgagttcttctgatgtaaaaaatgcctgccgtttaagttcgagaacccagtctgaccgaaaaggagatgatgcgtgttcaccgaatcaatctacaaatgcggtagctgcaccaggttatgggaatggtggttttttccctactcagagttcacaaggcgtaacagacagcgttatcgcatttattaataatttagataaagttcctttagaacccttaaccacaggtgctatctcagttccatatgatgcattgaatcccaaaaatttacaggaatatggttatttacgagcttttgagccaaatccagctaacacgtacttaacatggcgtggaaatttaaagaaatatcatgttgttttatctggagcgaatgcaggtacttttgaagctaatactggtgggttggtttacaacgcaactggggcatttagaacgggtacaaaagattattggaatagctctacttataatgatggaggtaaagtcttttttggtggttcatatgcaaaagttcctttacccattgctggacaacctgaaacacgtgatgaagaaggaaatatcacaaaatattattacgcagtacaaactaaaatccgcaacttatttactgatgtttccgccgtcgcatcagatggtagcttaacgaaaatttcaacttctggaactaatttgctaaaaattccagctgctccaccagaaggaactaatccttttgatacggtggctaatacagcaagttatgttttaggtaaatttgatccatcaactggacaaaatattttaaaagcttttcctataagcttgaaattaaaaatattaaattatttaggttattcaacagatattaatgcaacaactctgccttcatctttggttacatcgaatgaaccttatttatcgatggggggaagtattcactctttaccggttcaactaacctacaatggaacactagatgataatgggaatttaacatctgcccgagaacaatccatcctctatggaactatggaaggcggattacatattgtggatgcttcatctggtattgagcaaatggtctttgttcctgcagatattttaaatgattcagttgcttccaaagctttagttgttggtcaaagtgatgcttcagctcccgctcatggtatggacggagcttgggtatctgatccagcctataatattactacagtgggaagtggtagctcggcagtatcaaaagtaactgcaaagcaaatgaatatttatggcggcatgcgtatgggaggaagtagctactacggactagatgtattaagccctacttcaccgaaactgctttttagaataggggcagaccagactgactatagccgtatgggtcaaagctggtctaaacccgtactcgcgaacatccgttataacggttctattagacgcgtcctgattgttggcggtggttatgatcagtgttatgaaaaaccaaatattacgttgactgacgcttgctttaccaatggaaaagcaaaaggaaatgctgtctatattattgacgcaaaaactggtcagcgtttgtggtggacaagtgatacaggttctaatactgataacgccaatatgaagcatagtattgttagccgtattagtactttagaccgtgatgctgatggcttagtcgaccatctatattttggagatttaggcggacaaatttttcgcgtggaccttaataataatcagacaaaaaccaattcgacctatagcagttttggtgtcagagttgtgcgtttagcgaatttagcaacaaatgattcaacttatgatggcacaaatgattatacaggtgggaatgctcctcgtttttatgagcctccaacagtaacgatccacgattatggaattcacacttttattacattaggaattgcatcaggagaccgtagtacacctttagatgtttacccactcacaggtcgtgaaggtatgacgcctgcaagtgcattaagtggacgtcctgtaaataatgtatatggaattattgatagagactttgttaaaaagaacttaatgtctttaactgataatcagcttgaaacaaaagacattacacggacaggcttaagaaaaaatccacaaattctaagaacaggtgaaacaagagtagcacaaattttcttccccactacaggagtaggtaaaggtggttggtatcgctcgctttctagtacgagtgatggtacagaaaaagctaataatagttttcgtattaaaggaggactcaaagcttttgaagaaccaatggcaattacgggtaatttaattattccagtttatgaccctcaaggaacgggaattgttgcggcagatccttgtctacctcgtgttgtgggagaaacagaccgacaaacttattgtttaccatttggtgcttgtcttaatccggatggaaccattaattcaaataaagaaaacccgagcgggtttcaaacaaaaactggtagtaactgtccagctggagtctctgaatgtaatacaaatgtcattggtgcaggtattcgtaatatcacatttgttccaaaaagagatgaacctcctgtgactaatagttgtgggaaattacagctgtctggaaacgagaacggaacaggtgagtggcaatgtacaagtcatttacttcctgtgcgctggtatgagcgctatcgctagaaggaacagcttatgaataagtactctattctacggttcaatcaaggggttaccttgattgagcttatggtcgtgattgttatcgttgctatttttgcttcaattgctatcccttcatatcaaagttatagccgtagagctactgcatctgcggctaaaagtgaaattttgaaattagctgaacaattagaacagcataaatcaagaaattttacttataggggttttaccacaacctctataaccctacctcgcgggggatatacgattcaaattactgatgatacgaccacaggtaatttattaacaaattctgcttctaatggtcaaacatgggtcattaaagcgacaactacagattcaagaaactttaattttattgctaagaattcaggtttgcgttgtcaaagtttaacagctacggctgttgataatgactgtggtggaacagtcacttgcaatgtatgtgaaacaaatagtgagaattggcaatgaagaatggttttactttaatagaaatcatgattgtagtagcgataattgcaattttagcagctatagcgacaccttcatatttgcaatatttacgtaaagggcatcgtacagctgttcaatccgaaatgatgaatattgcccaaacattagaatcagaaaaagtagttcacaatcgttatccgtcgaatgcgaccatacagtcgatttatggttctaatgtgagtcctatacaaggtcaggctctatataagttagcttttgcaactctgaatgattcaacttgggtacttactgcaacacctatttctactagctcacaagcaggtgatggaattatttgtttaaatgaccaagggcaaaaattttgggcaaaaggtgccacagtttgtgcactatctgcttcatcaagttggacagagtaatttaaattcaaaactgcggataactcaaaatttaatctttctttcagggtgaaaatcacgtagaatgtcgccctctatgaaaggggtttgaagtgttgccgatggtcggcgcagggataatccgtaagaattataaggcttttatcatggttgttattcgtttagcacgtggcggcgcaaaaaaacgtccattctatcaaatcgttgtgactgatagccgcaatgcacgtgatggtcgtttcatcgagcgtatcggtttctttaacccaactgcacaaggtcaagcagaaaaacttcgtttagacgcagaccgttttgctcactgggtttctcaaggtgctcaaccttctgaacgtgttgcttctttggctgctcaagctaaaaaagctactgcataattattgtagtaggtagcccatgacaccaacacagaatgttcccgaagatcgtattcagattggacagttacgttcagcttatggattaaatgggtggctctgggtgtattccaatacagaacccatgagcaatatgtttgactacttgccttggtacatcgagaccaaggccggttggcaaatcgttgatgtaaaacgttggaaaccacatggcaaaggcctggttgttgctctaaaaggtgtgagtgatcgcacaggagcagaaagcttggttggcgctaatatctggattgctaaatctcaactgccgaaagcagatgtagatgagtactactggtcagatttgaaaggcttaacagtgttaggtcttgatgacgacgaacaggaagtgaacttggggcaaattcatgagttgtttgaaactggagccaatgatgtgatggttgtacgcgctacaccagacagcattgattcagaagaacgcatgatcccgtggcataaagatgtggtgcaacgcgttgatcttgaagctggtcgcatttacgtcaattggggcgtagattattaatcctttttataggattaacgcagcaggaaaatagaggagtctgcggtgttttttgcagtcattacgctttttcctgaaatgtttgaagcgattacagcctatgggattagcgggcgtgcagcaaaacgtgacatagtacaagtcacttgtattaatccacgtgattttgctgaagggaattaccgaagagtggatgaacgtccatttggtggtggccctggtatggtgatgatggcggagcctttggcaaaagcaattaaccatgccaaacaacttgcttcgcaagcaggatgtgttcatgtacctgtggtgtatatgtctccacaaggcaaaactttaaatgaacaggcagtacagcagtttgtcgattatgatggcttaattgtattgtgtgggcgttatgaaggcgtcgatgagcgtttgatccagcattatgttgatcaggaatggtcaattggagattatgtcttatctggtggtgaactacctgccatggtgttgcttgatagtattattcgccgtttgccgaatgtaatgtcagatgagcaatcagcgatacaggattcttttgtagatggtcttttggattgtccgcaatacactaagccagaccagtttgaaggtttagatgttcctgaaattttaaagtcgggacatcatgccaatattgagaaatggcgttttttgcagcgttatcaacgaactttagagcgtcgacctgagttgattgaacaggttacgttgactaagcagcaaaaaaaatggctgtcagatgaacaagggtaagcatattccctgtgtttttctgagcaaaagatgagaagctttgcttcgaattaaagcataagtctatttttttatagatttatgtgcacttaaggctctttacggttgtcgtaaagggaaagttaaacgggttgatatgcgctttagcctctatccccagcggaaactcaggcctcttctgactccgcatatattggagattcccacaatgagtggtaaacatcctttagttcaagctattgaaaattcacagttaaaaactgaccttcctgaatttgctcctggtgacacagtagttgttcaagttaaagtaaaagaaggtgaccgtgaacgtcttcaggcatttgaaggtgttgtaatcgctaagaaaaaccgtggtttgaactctgcgttcacagtacgtaaaatttctagcggtgttggtgttgagcgtgtattccaaactcactcaccagttgttgctaaaatcgaagtgaaacgtcgtggtgacgttcgtcgtgctaaactttactacctccgtgacttgtctggtaaagctgcacgtattcgtgaaaaattaccagctcgtaaagcgtaagcttatagcgagtaaaaaatgcgccttttggcgcatttttttgttttaaagcttataatccttgaagttttaaacggttagcatgttgacggtaaaccgagacagggtctgctgcaaaaatagaacgtattcccatgacctgattgacttcatctaaatgattccagttatagtcgtcacggatagttttaccaaatttggcactgcatcgagaaaccagcccatcattatccccaaatgggtcaaccactagactacttcctgttaatgcaatatcaaaaggatctaatggatttgtgagtgctttattgccagagaatgaatacatatagattcctttctcttgataagcgccttcaccacaagacgtggtaggaacacccattggaaattgagaattaaactgtgcagagccttgagtcgataaactgtgggcacctgctaaggagtcatgcggataactatttgggtctagacctcctgcccaagtaattgctgcggaaaaccagtttactaatgttgccagtccggatagaggagtaccctcaacattcaggatgacatctgccattggcgatcctttgtgaggtgcaccaatagtagtaagcgaagcgactttttcaggcatgatcccagcgacatagcgaattgtaggtcccccgtggctatgtccgatcaagttgactttaggctttccagtgatggcaataatttcttctacttgttgggcaagttgttctccacgaacttcagttgagttaaacggagaaactcttgttgcccagacatttcctccgttacgtgcaagatcaggaagaatctgataccagtagtccagaccaagcgtatctgttccaactcgattaaaacccgccataccatggttaaaaaccaatggatatttggtttgtgcataagtcgaatagacgaaagagcttttgacttgctcggcatttgtggcatgggttgctgaaacactcagtcctgagagtattgcagcacagaaaaatattaagttccttttcattttttactcactatttttattttgtatgagaagcagcttctactgctggataaggtttggctcactttgaaatagaaaagcctagtagttaaagggtagttcacctccttggtcatggactgtttcaaaagttctaagacgaagctgttcttgcgatgagctaaattgttgttggcgtagttgttggatagcttgttttttagcgttgtcactcatattgctatgcaggacttcatcacgctgatttaagtagccagtcactcgctgttgccacgcattacgctgtatatctaaagtttctaatcgttgagttgcctcggctccaacaagtgctgtacgcatttgccgaagttcctctgctgaaccgttgcgagctttaatttgtttggtcagtgtgtgtaaatcatcaagctttgaaagttcttgtaggttttcttgccagtcttctggtagttgttcaaagcgctctttaagttttttagctttttcaatttcgcttaaagatgaatcttctaaaatcttcatgcgatctaatgtgtagttctgataaatgtcttctgttgaaaataacccttcaatttcagaggcagagaagaaacgttttcttatatcttgaattgagctgaagatcttttgaaaataattttgatcttgttttttagattgaggcggttgaatttgtgcaagctgctcacggtattttaaataacgcgtccacaaatcaataatctgtgagcgggctggctctaaatattgatcttgtataaatttcttaaaatgagttttaacttgttgtaaattgctctcgccatactgcgtaataaaatattcaaagcagtcacgggtttggctattcacaactaaatgctgtgaactatcaatttttaattggcagttaacttgagtatcttgctgacttttactcaaataagtattttcgtttaatgatgaatttaaagtagattgcgaagtagctaccaaacttttagcttcatcctgatttggctgaggtgaagtattttccgagtctgggcttagccaatacacacatgcgatgaggctcaaaataaaaaatccgagcacacaccaccctatctttttctgcatcctttgcataaagatatcttccttaagttttcatttgttgtttttttactcgatcattaatgtgccataaaataagtgaaaaggcacctaaatattatgaaaatatcttgctgaatttgctaacatgtcggcacttttctctagctttgtgttccagtaaaaatgacgacaaaaaatcaaaaaatttctcgtcgccatatcagtggtgtatttcttttaaataaaccattagggctaagttctaacgctgctttgcaaaaagtgcgttggctttaccgtgcccaaaaggcgggtcatactggtgcattagatccattagcaaccggtttacttcctatttgtttaggagaggccactaaattctcacattacttgctggactcgacaaagcgttatcaaactactgttcgattaggccaaactacaacaacaggcgatgttgaaggcgatattttacaagaacgtcctatcccggttcttagcaaagagcttattgagcaaactttagaaaagtttaggggcgatattcaacaagttccaccgatgtactcggcattaaaaaaagaaggtaagccgttatatgagctggccagaaagggtatagagattgagcgtgagacacgcccggttacgatttatgctttagaactcattgaatttactgaaaatagtatcactttagatgtaacttgttctaaaggaacatatattcgtgtgctaggtgaagatattggtgaggtacttggttgtggtggtcatttaaccatgcttcaccgtattcaaactggacattttgaactcatcccaagttataccattgaatatttggaaagcttaatggaagagcaaagagaagctttgctactgcccgtatatgctccaattgaccatttcttaaaaattcaggttcccgaaggacgggaaaaatatttttgtaacggtctagaaagcaatattgatcattctgcagaagcagaagtgttggttttttcgggtgaacgctgtctaggtttagctgaaattaccgataaaaaacggttggtacctaaacgtatcttaaatttgtagtagatgtagagtataaaacatgggcatggaatgggatgttatccttagtttgatcttttttgcgtttactgcgggagcaattgatgctgctgttggtggcggcggactcatccagattcccgggatcatgagcacttttcctaacatgtcgactgctacagtgattggtaccaataaagtctcatccatttttggtacggcatcggcagcttatacatttgctaaaaaagtaaagttgcaatggaagcttttagccgttattgccatttgtgctttgattagttctttcgcaggtgcggcttgtttgtcgcttatccctcaatcggtattgcgtcctttcgtattcgtgatgttgattgtgattgcgatttataccctagttaaaaagaacttcggacaggttcataccgagcaaaaaattaccacgaaaatgttaattttagctggtatcggtagtctggcgattggcttttatgacggtattttcgggccgggtactggtagtttctttatttttttcttcattcgttttttacaagtcgattttttacatgcttcggcgttatcaaaaatcggtaattttatgactaacttagctgcgctgagtttcctcatcccaactgggcacgctattttacatattggtttgatgatggcagcggctaacgtgctaggttctattgttggggtgcgtaccgcgcttaaatacggtagtggttttgtacgtattatctttttaattttggtgagtatcctgatttgccgtttgggatatcaaatgtttgttacaggttaaataagataaaagtatgaactgttcctgaggagtggttcatacttttgtgtatcatttaaagctataaatataaaaatcattacagaaacttactagaaagaaaactgtgtaaaaaatagtctcattttaagctacttaaataatataaattttgccgtacgataaaccttgaaataaaaaagattttttaactaaaaatgaggaagagaatgaatattttcgaagcattaagagaaagccacgaaaatcaacgcaacctttctgaacaattaatccagacacatggtttaaccgaagaacgaaaagaattatttgatgcattaaaaaacgaactttatgctcactcagttgccgaagaccgttatttatatattcctttaatgtttgatgatgtcggtttggatattacaagacatgctttatctgaacaccatgaaatggatgagttggtcgagcaacttgaaaaaacggatatgagtagcccaagttggttggcaaccgctaaacagttgagcgaaaaagtccatcaccacttaaaagaagaagagcataagttttttcagcaagccggtaaaattcttaaagacagtgaaaaagaaacgctaggcaataaatatttaaaggaatataaaaagtataaaaaacagcaataagctacacctatgatgctgttttacttcttaaagtaaccccaattgaagctagcattacgcaagctaaagccacccattgcagcatgctgatttcttcgtgaagtaataagaaacctgttaatgctgccaatgctggcgctaaacttgttagggtgccataagttaatttattaagttgtttgagtgccattaggtctagtgcatagggaatagcagtcgctaaaactgcaataactaaggctttaccccagtactgtgtatcaagtaatgctgggccattataccaaataccaattggtaataaggcgatggcagatacggtaatccctatggttaaggcatgcattcctatattttgagttacaactttttgaccaaaataaatatagaatgcccaacaaagccctgcgcctaaagcacaggctgcacctacgtaagaaaagtggtgttgagttggatcttgccaaggtaccatgagtgcaatacccagcatggcaaaagctacccagatataatcgctcttttgtttgatagaaactagggctaggcctaatggaccaataaattctagacctactgcaatcccttggggcaatttcccaagagatgtgtaaaataagatattcattaaccctaaagatgcgcagtacattaataaatcacgccattttaaataaggtaagcgagaccagattttccaagaacggaacataacggcaacaatcactgctgcaaaacatagtcttaaaatagtaacggtaagcggatctaaagctgcgataagttgcttggcaaatgaagcgctgatttgatacgaaaccatcgacaaaatcatatagagcacagcaataattggaagattttgcatggaaataccttaacgctttatttgatatttaaaaaaataagggtgattaattatagccaatactgggtttcaactcgtaggttttgcagaattaacttactgttttttcacgttgttgtcgggctctttgggtggttatggtacaacccacagaagcagtaataatggtggcgagtgccaaccattgattccataacaggtattcacctaagaagataaaaccggaaagtgcagcaacagctggttctaggctcatcaatgttccaaaacttaaaggtgttaaattgcgtagagctaacatttctaaagagaatggaagtgcactggctaaaacggcgagaccaataaaataaaaaaagtatggtagttctataacttgcccaatcgagcctgagaaaaaagtaatgggtaaaagtatacaagcacctacagtcatgcccaaacaaacggtatggttacctgagataccagaaggcttttgccctgcaataatatatagggcccaacaagcacccgcactcatcgcaaataggactccaatccagtccaaactatgtgcttggttaaaaggaaataataaaatgagaccaataattgcgaaagtgacccagacaaaatcatatttttgtttagcatggtaaagggccacactgagtggaccaataaattcaaatgcaaccgcaataccaatgggtaaacgttcaagcgataaatagaaaagagcattcatgccagcaagagcaaagccatagctcaaaatagctttccatcggacctgactaaaattaattttccagatctgaaaaatgaaagccaaaataaatgccccgatacataaacgcattgcagaaacagtcagtacaggaaagttctgaaacaggactttagctaaggatgcgctactttggacacttaacatggcaagaataagaaagcccaaagcatgaagctgggatttctggcttggactggacattttattatttgatcaattggtatacttttcacatgataatgtaaatacctataaaaaagccacagacaatgctgtggcttttaaatttacagtctgtattagaacaatacgcgtacgcgaattgtgccttcaacttcatgcaacatatctaaagcttcttgagaagcagaagcatctacgtccattacaaggtaaccgatgtcgcctttagtcataagtgactgaccagaaatgttgatgccttgttcagcaaacaagttgttgattttagacaatacacccggtacgtttttgtggatgtgtagtaaacggtgttgacccgctgtcaatggcaacgcgatttctgggaagtttaccgcagaaagtgtcatacccttatcagagtaagcaacaaatttctctgctacttctaaaccgatatttgcttgagcttccattgttgaaccaccaacgtgaggagtcaagatcacgttgtctaaaccacgaagtggagactggaattcttcaccatttgcttttggttctttcgggaatacgtcaactgccgcacctgcaaggtgaccagatttgattgcatcagctaaatcttcgattactacacatgtaccacgtgcagcatttaagaagattgcgccttctttcatttttgcaaattgttctttagtgaagaagttacgtgtagacggaacatccggtacatgcaaagtcacaacatcagcagttgctaaaagttcatctaaagaaccaacttggcgagcattacccattggtaatttagtgactgcatcataataaatgacatgcatacccatactttcagcaagaactgaaagttgagaaccgatggaaccgtaacccacaatacctaaagttttgccacgagtttcaaaagaacccacagcagatttgtcccaaccaccacgatgacaagccgctgacttttcaggaacacggcgaagaagaagaatagtttcagcaagtacgagctctgcaaccgaacgcgtatttgaatatggtgcgttaaatacaggaataccacgtgccatcgctgctttaagatctacttggtttgttccgatacagaaacaacctactgcgatcaatttatttgcagcttcgaaaacttcttcagtcaattgggtacgcgaacgaataccaataaagtgagcatctttaattgcttctttaagcgcttcgccttcaagagcagttttgcgatagtcaatgttggtataacccgcagcgtttaaagtatcgactgcgttttggtgaacgccttctaacaaaaggaaacggattttatctttaggtagtgaaagatgttggctcattacggctccgctacaaaggccaaatttggtggcggtataataacatactgggcagcgctatagatatttcgtttataccatcgccttatggcaattttatctatgtctaatcacttccatttatggcttgtcgagcgttacaaaatatgcttggcctacgttgaggcccaaattttcctttaaggccttataaaaagtgttttattggtgttaaacatgttttgtagtgacagtatctctattctgaactttatcgcttgtgctgttacatgtagaatataggagttccttgaacattatggctttgctcaggtgaaaacctagagaaatatgaggtcatagtcccaccacagtttacttcttgctaggtctgcaaacgatgaatgctccagtcgctttaacacctgagttactcacccaattaacagcaatcgtcggtgaaaaccgtattaaaaccgatgctgatagtctcgaaaactggggtaaagatcataccaagcattttaatccgaacccatcggtcatcgtttttccgtcaacgactgaacaagttcaggaagttgtgaagcttgcaaaccagtttaatatcgcaattacaccgtcaggtgggcgtacaggactttctgctggtgctgtagcaaccaatggtgaaattgtcattagcatggacaaaatgaaccagattcttgagttcttcccggcagaccgtatggttcgtgtacaagctggtgttgtgactgagcaattgcaaaattatgcagaagagcagggtatgtattatccggttgactttgcgtcagcaggttctagtcagattggcggtaatatcggtaccaacgctggtggtattaaagttattaaatatggcatgacgcgtaactgggtactcggtttaactgtagtgacaggtaaaggcgacattttacgtttaaacaaaggcatgattaaaaatgcaactggatatgcattacagcatttgtttattggtggtgaaggtacattaggtttagtgactgaagcagaaattaaacttgagcgtcaaccacaaaacctacaagttttagttttaggtgtgcctgattttgatgcagtaatgcctgtgttacatgctttccaaaaagatatcgacttaactgcatttgagttctttggtgagcttgcaatgcaaaaagtactcgaccgtggtcatgttcaacgtccatttgaaactcaatgtccattctatgtattgcttgagtttgaagcgccatacgaaccgattatcgacaaagcaatggagattttcgagcactgtatggaacaaggttgggtacttgatggtgtaatgagccagagccttgaccaagtagagagcttgtggcgtttacgcgaagatatttctgaatcaatcgcgccgtttattccatacaaaaacgatatttcagtattaattactcacgtacctgcatttattcgtgaaattgatgcgattgttcaagaaaactatcctgactttgaaatttgctggttcggccatatcggcgacggtaacttacacttaaatattttaaaacctgaaaacttgaccaaagatgagttctttgcgaagtgtcaagttgtgaataaatatgtgtttgataccgttaaaaaatatgatggttcaatctctgccgagcatggcgtaggtatgacgaaaaagccatatttggaatattcgcgctcagctgaagaaatcgaatatatgaaagctttgaaaaaagtatttgacccgaaaggtattatgaatccgggtaaattattcgatctttaattagatctattttgtagaactacatagtttctacagagtaaccgacaaaggcatagcatcataaagctatgccttttgttttttggtgatgaaaatgcaacgtttatttttaatttctgcactctgtgctggacttatgacgggttgtgcaaccacaagtaaattaattccttttgtgggctcagaaaccccaatgcaacaagtacttaaaacgcaacccgagattgtaaaagagcataacaatacttcagttcagcaggtatttaaccgagtagaatccccaacagtttctcgcattactgttatacaaaccggtttaatggatgactctgtctcagcaattcggacggaatatttatttaaattggttgatgaaaagtggcaattgcaaaataagcaaaagagctaccaatgtgcaagaggaaaaggttctaaaggtttccaaacgcagctttgttcttaagcataaaaaagacgataaatatatcgtctttttttatttcttaaattatacgccgctttctagaattttaattttgacgtcaactacatcatctttgactgcttcatgatgcgcttgcatatgaggtgtagctaagtgtgcttcaagatgagccacactttcccatttttctaacatcacaataatgtcagggtctttgttttggaagctcgcatttgaaatgtggtcaaccaaaggttcataaccatgacaaccatcttctgctaaaacagttggaatgattttttgaaatgcattcaatacgttttggcggtgctgtccacccgattgagtacgaatttccgcgataatagtaagcatggttttctccgggttaggctgctgcaaatagtgtgttcaaatgtgctttgtatgcttccacataactatctacatcaggcattttaattacatcatttacaataaatgttggtagggtgctcatacctaagaactgatttgctttatgaaatggtaaataaacaccatctacacccacgccatggaaaaactgatccgcatcgtcaaatgcttccattggcgcattccaagtaagcgacaacatatattttttgtcatgaattaaaccacctgaaccatatttttttgaggcatcagagcggctacgaccatcacttgcataaagagaaccatgacctgtcgtaaatacatcgtcaatatatttttttacggtccacggtgcacccatccaccagcccggcatttgataaatcacgacatctgcccataaatatttttctacttcagcttcagcattgtagtcactatctgcacgagtgacttttacttcatgacctagttcagtgagatgattcgtcgctaatgtcgtgagtgtgtcatttaattcaccatttgagtgggcaaattgtttggcaccattaatgactaaaatattgctcatgggagttactctaattcaattcttaaacttgagcgatactttagagaacttactcttaaagaaaaatgtagtaattggaaaaatattattgattaaaaatcattaatcttggtttgataccttatattggtttctttattttaatggcaaatactttacaaagttgaacggaaaaaattatttgtagcctttagcatcaaggtgaagttgtggtggagttgagtatgaaaaagattggtttactcatgatgtgtaatttgttgattctgagtgcttgtacacccaatacaaatccacctacacctcaagcgaacagtccgatacaagctgttttgctcgatcaacctaatcttttaaataatgccagtaatttaagtatttcacagcaaatgaatgccttagaggatccttccaatgctcaagttactattttgcagacagagccgagtgaagatgctgtttcgaaaacacgtactgagtatttattaaaaaaagatcagactgtttggaaaatcgtgaataaaaaacaaagttatcaatgtacaaaaggcgaggaaacagcagactttcaagttaatccttgtccttaaagctgaattactattgaatatgtggataactttagggttattcacaatataaaaatgagttcgtcatcattaaaatatagaatttaaaattgttggaattgtccgattgatgatcaatttgaaaagtgatattgtgtcatccggcaattatgccagatggtaaaaattaccgaatctcacgtcatacattttttctcgttttagacaccttgtgaatacggtgtttcacattctaaacatgcactctcacggcatataacaacttaactaaagattgactgaccatactgtcatcgtcatgactacattatttatttcaatatgtagttgctgagacatagtggccgctattttgaagtgtacaaactcatgaaaaatattcaaacgacagcgttgaaccgtacaacgttgatgtttcctttagctttagtgctatttgaatttgcggtttatattggtaatgacctgattcagccagccatgttggcaattactgaagatttcggtgtaagtgcaacttgggcgccgtcttcaatgtcattttatttattaggtggtgcatctgttgcatggttactaggacctttatcagatcgattaggccgtaaaaaagtacttttgtctggtgttttattttttgccttgtgctgttttttaattttattaacgcgacaaattgaacactttctgacattacgttttttacaaggtattgggttaagcgtaatttcagcagtgggatatgccgcaattcaggaaaattttgccgagcgtgatgcgattaaagtcatggccctcatggcaaatatttcattgcttgcgcctttgctagggcctgtacttggagctttcttaattgattatgtttcatggcactggggtttcgtggcaattgctttacttgcactgctgagttgggttggcttaaagaaacaaatgcctagtcataaggtgagtgtaaccaaacagccttttagttatctttttgatgactttaaaaaggtatttagcaatcggcagttccttgggttaacgttggccttaccgcttgtaggtatgccgcttatgctctggatcgcgttatcaccaattattttggtcgatgaactgaagctaacgagtgtgcaatatggtttagcacagttcccggtatttttaggtttaattgttggtaacattgttttaattaaaattattgaccgtttagctttaggtaaaactgtcttaattggcttaccgattatgctcactggtacgctaattttaatattaggtgttgtctggcaagcctatttaattccttgcttgttaataggtatgacactcatttgttttggtgaaggaattagcttctcagtattgtaccgttttgcgctcatgtcatctgaagtgtcaaaaggaactgtagctgctgctgtttcaatgctattgatgacgagcttttttgcaatgattgagcttgtacgttacctctacacccaatttcatttatgggcttttgtcttatctgcttttgcatttattgtcttgtggtttactcaaccacgtttagctttaaaacgagaaatgcaggaaagagttgcacaagacttacattaaaaaaataccggaatttatattccggtattttttattctatttaatttcatgctctaaaagtttgccttttaagcttaagagttcaggcaaggtttctaataataaactcatctgttttaagacaagtgtgtagttctctgaaaaatgttcgtgagttattaaactttgaatttgctttaaagtctgttcaagaaaactaaagttaaccgacgcttgttcaaataaactttgtttaagaatttgctgacaatccagtaaaagttgtaatacctgttgatcatcaattttttgtctttggctgcctaatgctgcgacataactcaactggctgtggctataaaccaaataacgaaaggcgtaatgaatcagctctggatttgggttgggctcggcacttaagcttgaaatcatattcgacagttcaatttgcgcgttatgtgcagcacggcgaattctacgatattcaatgtcttgatttttcccatgctgatattgctcgacaatcacattgaagtaatcaaaggtggcttggctacttttcttaatattgtttggaatattacggaagttccagtccggccatataaaattaacagcaagccaagcaataaagcagcctaataaggtgtcgattagacgaggtaaaataatgctgtaacctgcaccttttaaattgaaaatgagcaataccattaaggttgccatcagtgttgccagcgcatattttttctggcgtaagtagaaaaagctaactccacaaataatggtaagaatgagttgaccttcaatactaggaacaaaatataaaatgggaatacccaataaaacgccgagtaaagtcccaatcgttctaagctttaaacgacttttggttgcaaagtaagtaatttggcaaacaaataaactggtgagcaaaatccagtaaccatgttgggcaaaaggtaagagggaaatggcataacctgcggcaaatacaaccgcaattcgtactgcatgtctaaatagggccgattgtggcgtcagttgctgccgaatttttaaaacaaggtctgaaaatccttgaatatcatcatctagtaaattgagatgttcttgcttgttctgacttagcgtttcattaaacggttgagcatattgaagctgctcaaattgttcatgcattccttttaaattattaaaaattagctttaaatttttaacttcaaaattttgtggatgctgttgtatccagtctttcaaagagctttccaaatggtttaggccaatttggctttcttgagaagactgatattgttgattatgcaaaatgcattgggctaaatcatggcaagcttgtgcctgtaagcgtaggtttttctgaaaacgaaaaatgagatcgctacggctaaaattttgttggatatgctcgtagtgtaaataattagaagttgcttgctcgtgtatatctcgcgcaaaaaagtataggtttaaccagtaaatacttttattactgactcgtgatgccttaaggcgagtcagcagagagctgcgtatttggttaaggctttgcgcaacttgtgtattttgtagtgataacttaaataaaagctgttcaacattttctttattatctgggtcgaacaaccgtgctttagcttgaagtaaggctgaaatttcttcaaaaatttgtgaaagtttatcttgtaaaggaagtgttggtttaagaataaaaaataaaatagaagttaggccgtaccacaacgcaccatagacaaaataagtaggctgttggtaccagtatgcatattctcctaaaccaaacatactataaattgagagtaaaatcgtaccaaaagaaatggtagcgtagcgttgccctaaagctcccaataaaatgaaacaagcactggaaattgaaagatataaaataaataaaaatttataaggtgctaaaaaaccaagaatagtgctgacagtaaaaaagagtaggcagacatagagcaggttgcgtaaacgaagacttaagcgatcatcaaaatcagtaagtgcagcagcaatcgcacctaaagtcacaggaacgatcagctcattatgacctaaccaaagtaaacctaaagttgtgcctgtgagtacaattaaaatttgcaggcaataaattaaaattgaattcgttttaaaacgattgaatagttgagtcaggttattcacggcttttttctaaatgagagggtacgtgacaattggtatttaaatttttattacttgaaaaatattatgcgttttgtttaaaaaagtcagtttattttttaagattttataataattaattagtctaagttgcttaataaaatagcaaaattgtggatatctttttagatacccacaatttaaaaaaaagcacttatttgattacaccacatgcgattcgcgctccgccaccacctagaggcagaggagaatctgaatagttatcaccaccagcatggatcatgatagcgcgaccttgaatgtcagcaagttttaaacgtggtgcaataacagcagttgtagctacaccagtattgtcaacgactaatgctggtaaatcgcctaaatgcccggtagttggcgtaccatgatgaggggcttggttagggttatagtggctaccagcagctaaagcagcgcctggttttccatctttaacagcaggggcacaagatggattttcatgaatgtggaaaccgcgagtaccacttggtaaatctgctaaagcaggagtaatgattaagcccttatcactatcttgaaagctaatcgtaccaagttttttacctataccattggctgtcacttcattaacatccaccacttttttagtatgcattgtggtaagtgcatgggctgtatcagatacagtcttacttaccgtgctacaaccgaccgttaataaagctgtcagtgcacatactgcaccaattttattaaatactggcattatagatatccttataactataaatctgatttttttattcaagcaaaggtgcgtgaaccctacaagttaatttaaatagtcactttgtatcttgaaatatttttaaatcattagcttagtttttagatggtggtaaatcatcatctgaatcataaatcatggttgtttttggcatgggttcagggtcaatcgtctcatgaagccattcacgccaaatcgctaataaaacagctaaaataacagggccaataaatagaccaactaaaccaaaacttgcaataccacccaatacaccgaacataatcaataaaaacggaatttgagtcgcaccagagattacaagtggacggatcacgttgtctgaactacttacaatcagcacaccccataagatgacgccaatagcttccatggtttgaccttgagaaaacaaccatagaccaacacctaagtaggaaacaggagtaccaaacggaattagggctaataagaacgttgcaatggtgagaaccattgggttaggtacaccagcgacgaaataacttaatccagccagtactgcttgagcaattgcagttaaacccacgccatacacaacggcacgtgttgtttctgaaattgtgtcgagataatgatgaatacgtggcccaatcaccatttccaaggctttactcacttgggttaagatcgtgtggccatcacgataaaagaagaaaagacttaaaatcgcaaaacaaagtttgacgatatttttactaatttcatttaataacacacgcccataacttaaatggctttgtacccaagctgcaatattctgaatagtactattagggtctgtgttaatttcgttgagtgtacgagatatttctttaccaataaacggaagattacgaataaaatcgggaacgcttaaatgacctgaaaagacttgacgctgtaaatcaaaataaaggttgcgaccttcatgttgtagaataaaaatagcacatgtaaatggcacgccaacaattaaaatgactaagctaatcataactgtagcgtttaaattatttcggttttcaccaaaaaaatgctgaattcttaaataaatcggccaagtcatgtaggcaataatggcagcccaaagtacaggtacaataaagtacttcaggatgttaaatcctaaaaagatcaggataaaaaacagcccaaacaataaaacgcgctgtaaagtaggagcgtatggatgcacgaacaaaattctctaatttttaaaatagaataaggtcatattaactgaaaaatgacctgagacaaattttaggcaggtgtgctcatttctgcatcttgcccacctaaaataaagagatggttttagaaccactcagatttatcttcaatcagtttatttaaaagaggctgccactggctttgaattgcaataaagttcttttgtggtttatcaaatacacttaaaccttgcattgctaaactgccataagcactacgctctgcaatccatgcaataggttcatgttcgattttttcaaaaaattgctgaatatcttttgagctggcgctgttcggtttaactcggtttgcaagtagtaaaatttgtactttacctttacgaatacgtttaatatcttgcaaatgcttgagaaaacgtcgtgtactgtcgatatcgaaaaatgaaggctgaagtggagtaataatcgcatgggcttcgctgactaattgttcagcatgatcacctgaaagggcacccggtgcatcaataattaaatagtctaaatttttaggtgcatcaccaattgatttttcttgacgccagtcgaggctttgaattacagctacgttatctggacgttgttttaaccattgtaaggaagatttctggttgtcagaatctgccaatgctactttatatcctttttgtgccaaagctgttgccaacgtaatggctgtcatggtttttccgcatccgcccttttgatttgcaataagtatcgttttcataaattcagttatattcagcagcacacttgttctacttataccttagcatctttttatgtgaagtagatgactgcctttgacaaaagtttaagctactccctaattttagatatgattgctcatctatcgcgatgatgtgtatttgttaaggaaaatttatgtccgtatggctggccatgcttattggtgctggtattggtattattatcacgacgctcattttatcaaatacccgtaatggccgaatcaaggctgaatacgagcaatatattgccgagttggagcttgagcatcaacaagcccttgcccaagcacaaaagagaagtgtgaatacgagccgcgccgtattaaaaggaaaaatggcagaacaatttgcgccggtcttgccggagtttcagtatttgccaagtgatgccaagtttatgggcgacccggttgattatattattttcgatggctataccgattttcgagatggagacggaactgccgatgatattcaaattattttgctggatgtcaaaagtggaggggcacgtttaacaaaggggcagcaagcaattgctcaggcaattaaggaagggaaagttcgctttgaaactttaagaatagattttgaagattaataatctatttaattaggcacaaaaatagacgaaattgatctgtattgttactaaattccgatatttttttcataccttagagctaccataaaacgaagatctaatgaatttgatctagcaatatttgaggtataaagcgatgaaaaaacaacgtttgatgatagctttgctggcgactttaggcatgggttcagcacttgcatcaacctcgagtgaatacaatattgccaatggcttgcttccagttgaaaaagatcaatcaatttctgtattacaaccatttcagggaaattttaggattttaggttcaaaaatttatcacaatgatgagcaagccaaattttcaccgattgattatgcggtaagttggggtttatttgctcaacctgaaatcgcgcgacatatttcagtgaaacaatatgaccgctatttaaactggaaaatagcaaaacttcctgtaccagctgagcaagcaatgcagatggtatcgaatatgcacattattcctgcaaaccctgaaatcgcccaacaaattaagcaagttaagcgtggtgatttggtttatttaaaaggtgatctggttgaaatcaaagataaagatttggtttggaagtcatctttgaccccaactgataccggcgatggtgcatgtgaactcttccgtgttcaatccattcactgggttgaaaaacaaaatatttaaattaaaaaagccttctttataagaaggctttttattgcatgcagttaaattaatgctgctgtgaggctttccagtactttaactgattttgtgcttgtaaatagtcagcaagctgtttgacctgctcatctttacttgcctgcttatcactaaagttcttttcttggttttcccaatattgatagagtaagccctgaatataacgaccttgttcagtttttaaatcgagatcttttaacatggttaatgatgaacgcacgttatcaagtgtacgtttttgttcaaattctgcggtgagtgtgccagcctcatgcaattttgctaactcattttccatctcgtcactcatttcagtaaagcggtgatcgtaatcttctagtagtgcaatatcatgagcgtcatccgcagtagctgggaatttcttcactggtctttcattgagtttttctaagacctgatcggtagatgaacttgtatgagattgttcagtctttgctggctcatctgcttttttacaagccgtcaataataggctagagctgagcaaagacattaagatgatatgaggcgttttttttaacatagctttcaaccgaacctattctctatgatttgacgacgtacttttttgaaaatgatatgcatatgtaatatatggaaaaacaatctgatcttgtgggcctaacccagtaaaatcataaacaattttttcaaacttagctttgagctgtagttgatctttttcagtcattgctgcaataaaacttgttgaaagtaaccgtttactcaccacttgttcgacagtaccatgctgcgattgcgaaaaagtatttaaattgtcaaaagtaaataaatcttgctcttcaaaaacctttttccacctttcactatggtaacgaggtgtatcaccttcaagtggtagtagaaaatccgctaaggcttttacccagtctgtactttcatcgcgctggttccaaacaagtcctaaatgtccttgaggttttaatactcgatggatttcggtcaatgtttctatgttgtcaaaccaatgaaaagattgggcacaaatgacagcatcaatttgttggtcatttaccggaatattgtggctaaaggcttgtatagttttaatatcaggataggcttgctgaagctgttgtaacatctcgccaattggctctactgcagtaatattggcatgtgtctgttttaagtaaggtaagaatttgccagtacccgatccaagatcgataacagtagaattttcatggatttggagccgatcttgtagccaacttactatttctacgggataatttggtctaacttgctgataaagctcagcagcagagctgaagcctttttgagcggcaggatgtaaggattgtgtcatattttgcgctttttaatctgactggcatctataaaataagatactccgcaatcataaattggcaaaacacctattttgtttcatttttgacgatgtatgtgggagtaaattttctttcggtgtgagcatggataagcaaattatttttgaagacgaacacattagagccatttttttacaaggcgattctaatatattagttctctcttttggcgatttgattacccgggcgagtggcttatctatcaatgctgaaaagtctctaataaagtaccaatacagtgttattggggtgatgccaaaacaaaaatcatggttcccaaaggccagtatggttgagctggcaaaagtcattttgcctattattcagcgttttaaaaatattgtaggttatggcggctcaatgggcggctatgcagcaattaaatattcgaatttattaaatatgaatcgaatcattgcatttgtgcctcagtattcaattgaccctgaacaagttgaagaccgacgctatgctgagtttttcgatgctgtcgcgaataaagacatgcaaattcagccgcaagatgtagatgcaagtcgtgaatacattattgtttatgacccttacttttcaattgatcgcgaacattacttaaaaataaaagagatcttaccaagtttacatacaattcatttgccttttacaggacatgaagctttatctgtattggcaagctcaagccttttacatgattttattgagcatgaatttgatgaaacgtatttctatcaacaagttcgtaaaatcaaaaaacaaagtaagttctattatcgtaatgttcttgcaaatgtgctgacataccatgacagcatgttattgaaaatattgcgtcaaaatgactttcagttagatgaacgttatttagacaatgcgcttaagcaagcggtctcacgtagtcttattaaaacaaagcaagctacagagcaagattttcagaagcttggaattaaaattcagtatagccagcaagctgaaaaccctaaaaaaggttttaaaaatcaatttgaggcaatactagtatttaatttgattaatctaaagcttgaaacctatgctgtagatgtagtgttggcaaacccttcatatttgattccgattgtggcagagcacactggggttgttcagattgaattaaataatgaactttatttgttagggatgaatgaccgaaaaattattaaattgtttaaacagggtgacgcactcacttcggatatgagtccgtttgtcattaaacaatattctgatttctttgcgttaagctacaagcaattaaatttaaattgtgatgaacaaggtgtttgtgattacgttgaaggttctgttcagccatctcaacagtttgtattgaccagctactaagtcatttcctcgattaaataaagctcaaatcttgagatttgagctttattttttgcttaaaaaatatttttttatcaatttatttgtatataaaattaaaagtcattatttaaataaatagtgtctctaatttttaaataaagataaagctaaaagtaggcatggggaattaagtgaaaaattattatattttaaaaagtatgattttttaatttatataaattaaagaaatgatgtaagattaattaaaatacaataattatcctaataattattaattgtttgtttttaaaatatattttatttggttggcaaaagattgcttaaaataactccactattcaaagataattgcatatttatttttttatcctaaaatgattttttactaaattgtcgttacagttttttatatgcaatcattaaattatcggaataatgatgcatcgcaacatggaagttctgcacctttgaaacgagcaatgagtactcgacatttggtgatgatctcccttggcggtgccataggtacaggtctttttcttgggtctggcgacgtaatctctcaagcaggtccaattggcgcaattatctcttatttcttgggcggtctaattgcctataccgttatgctgtgtctcggtgagctagcggttcatgtccctgagtctggctcttttggtgaatacgcacggcgttatatcggtccaggtacggggtatatgattacttggctatattggctgacttggactgcaactttggggactgagtttaccgctgcggccctgttggttcaggagtggtttccatctacctcggtatgggcttggactcttttctttggcgccttggttttctttcttaatgtaagttcaacccgcttatttgcagagtctgaattttggttggcgcttgtaaaagtaatcaccattatctgttttattggtttggggctgcttgcaattttcggctttattccttatcaggggcatgaaacagcaccattgttcagtaatttgactgctcatggttggttcccaaatggtcttttcccaatttttgccactatgcttatcgttaactttgctttttctggcacagaattaattggggtggcggctggcgaagctgagaatccagcaaaaacagttcctaaggcaattaatgcggctatttggcgcttattgattttctttgttggtacgattgtagtgattagttcactattgccataccacctagcaggtcttagtgcaaatgatgtgagcagtagcccatttgtgactgtatttaattacattggtattccgtatgcagaggatattatccgtttcgtaattattacagctttactatcagctgctaactcgggtttatttgctgcatcacgtatgatgtggtcgctttcagcaaaaaatcaattacctaaaatttttgcgaaactcacgccgtctggaacacctattattgccattattgtgacaatgtttggtgctattccaggattgctttcagaacaatttgcaccagaaacaatttttaaaaatttgttgggtgttgctgcttttacaatggttgtcgtttggattgcaatttgtatttcgcaatttaacttccgtagacagtggtataagtcaggaaaaacagtaaaagatctacgtttcgctgcaccactttttcctcttactccaattgtaggcgggctattctgtatagttacttgtatcagtatggtatttgatccttctatgcaagtgggctttatctgctgcattatttttatcttgctatgctatgtcagctatttcatcttttatcgtaaaaaagatatagctcaaaactaagtcttttgcttacttggttgtgttgattgaaggctccttatggggccttttttcatgggcgcaacttgagctttatatattttttttgaaaatgttttttttgttttgataataaaaccaaatattgacacataaattaaccacttgtcggaatattattaatagctaattattataagtttttaaataagtatatgtttatcatggttatttaataaagagattgtttaaatatttatatatctttgttttgaattagagaaactgaataaatattatgaaaatttatagaaattttaagaattttttgaaattttttgttaattaagtctttgttattaaatggtaattttttaatcatttttaattttaatatttttttaatttccataaaataaaattattatagtgtagtgtttttttaggtctggttacttttttattataaaaaatagagaaaattgattattttttctctgcttgtttattttaaaatgttctaaattaacttgctctgtgctatatttacttaaagattttatgtctatatgaaggcttgattaactcgcttgagtagtgatgtgaaacttgcagtattactgaacaatttttatttaaaaagactaatggagggatctatcgattagtcaaaaataattttagggacttatggtttttttgtttcatgaaccctagttctttttaactcccaaacggttatgtcacctcttttgtacttatttccagtcgacttatttgagttggttgcggtggaacttttgcttttataaagactttttataaatggcagatgaggcaaaagaatattgtaaaagatatcgatatataaaagtaaatcgtacttttgatatcacaagatggaatttaaaaggtctaaagctttagaagagctgaagattttataaataaatcaaaacattgttattgcaaggttttggttgctgaataataaagactgcagatttatcacatctgagtctgtgtaggtagataggaaaaaagatgtcagatctttcatacgtaaacgaacatagcgatgcatggcaaacttacttggctcaaattgaccgtgtagcgccatacttagaacatttagctgattatatcgatactttaaaacgtcctaagcgtgcgcttattgtggacgtgccaattgtaatggacgacggttcaatccagcactttgaaggctaccgtgtacaacacaacttgtctcgtggtcctggtaaaggtggtgttcgttaccatccaaatgttgacttaaatgaagtgatggcattgtctgcatggatgacaattaaaactgcagttttgaacttgccatttggtggtgcaaaaggtggtatccgtgttgacccacgtaaattatcaaatcgtgaattagagcgtttaactcgccgttatacgactgaaattggtcacattatcggacctcaaaaagacattcctgctccagacgttggtacaaatgccaatattatgggttggatgatggatacttattctactagccaaggtcacacagtgacgggtgttgtaactggtaaaccagttcacttaggcggctctttaggtcgtgtgaaagcaactggtcgcggtgtattcgttactggtcgtgaagttgctgcaaaaatcaacttaccaattgaaggcgcaaaagttgctgttcaaggttttggtaatgtaggtagtgaagctgctttcttatttgttgaatcaaaagcaaaaatcactcacgttcaagaccacactggcacaattttcaatgctgatggtattgatcttgttgcgctacgtgatcacgtaaatgcaaaccaaggtgttggtggttttgctggtgcacaagcaattgcagatgaagatttctggactgcagaagtagacatcattattcctgctgcattagaaggccaaattacagttgagcgtgctgaaaaacttaaagctaagttgattttagaaggcgcgaacggcccgacttatcctaaagctgaagatgtattggttgagcgtggcattgttgtagttcctgacgtggtatgtaacgccggcggtgtaactgtaagttacttcgaatgggttcaagacatggcgagctacttctggagcgaagaagaaatcaacgagcgtttagacaagttgatggttcaagcaatggatgacgtttggaatacagcgaacaagaatgcttgtactttacgtacagcagcttacatcttggcatgtgagcgtatcttaaaagctcgtaaagaacgcggtattttcccaggctaatctgaggaaactaccttttaggaaaggtgggccgagcaaatataaaggatgttataggattatttgttcggtccctttttctaaatgaattaaattaaagacagtaagacagattaaataaattaaatagatactgaggtaagcatggaacagccaatttctgtaactcgaagcaactttaatgactggatggttccagtatttgcaccggcaaatttcattccggtacgtggtgaaggttcacgtatctgggatcaagaaaataaagaatatatcgattttgcaggcgggattgcagtaaatgcattaggtcatgcgcatccagtggcagtcaatgcgttaacagaacaagcaaaaaaactttggcatgtcggtaacggttatacaaatgaacccgttctacgccttgcaaaacaactcactgaaaatacatttgcagacaaggttttcttctgtaactcaggtgcagaagcgaatgaagcagctttaaaacttgcgcgtaaagttggactcgacagcggtgttgcaggtaaaagtggcattgtggcatttaacaatgctttccacggccgtactttatttaccgtttcggcaggtggccaaccaaaatattcacaagactttgcaccacttccaaacggtattagccatgttgcttataatgatttagaagcggctaaagcagtcataaatgaacaaacttgtgcagtaattgtagagcctgtgcaaggtgagggtggggttattcctgctgatatcgaatttttaaaaggtttacgtgaactgtgtgatcagttcggtgccttacttatttttgatgaagtacaaactggtgtgggccgtacaggtgcactttatgcctacatgaactacggtgtgattccggatgtacttacgactgcaaaagcattgggcggtggtttcccggtcggtgcaatgttaacaactgataagtttgctccgcatttttctgtcggtacacatggtacaacttacggtggtaacccgttagcaagtgcagttgcaggtgcagtttttgagtttattaatacaccagaagtacttgaaggcgtgaaacaccgtcatcaatatttccttgatgcattaaatactttaaatgctgaatatcaagtatttgatgaaattcgtggtcaaggtttattgattggctgtgtactaaaagctgaatatgcaggtaaagcgaaagatattaccacatgggcaggcgaagaaggattactcgctttaatcgcaggacctaacgtggttcgtttcactccttctctaattattcctgaacaagatattgatgaagggattgctcgtttaaaaagagctttggcaaagttggctaaataaaaaaaaggaaagctagccatgatgattgtccgtcatgccgagtttcgagaccttgaagatatttataaattagcaggtaagtcaggtgttggcctgacttccttgccacaaaatatggatacgctttcggctcgaatttcacgtactcgcaatactttaaatggcaatgttcataagagtgaacagggatatttgtttgttctggaagataccgaagctcaacgtgttattggtgtaagtgcaattgaggttgcggtaggtttaattgaaccttggtacaactttcatgtgggaacacaagtacacgcttcaaaagcactaaatgtttataagtcattaccgactttatttttaagtaatgacagaacaggaagtagtgagctctgtacattatttttagatccggaacgccgtgaaaatcaaaacggtaaatttttatcgaaaatccgttttatgtttatcgcagcatttaagcaatattttgagaaaaaattaattgcggaaatgcgtggctactctgatgaaaatggatgttcacctttttgggatgcgattgggcaccattttttcaatatggatttctcaactgcagactatttaagtggtattggccaaaaagtttttattgccgagctgatgccacgttttccagtctatgttgaccttttgccaaaagatgcgcaagaagtgattggaaaaatgcatccacatactttgcctgcttatcatgtgcttgaatcagaaggtttacgttatcaaggatatgtcgatatttttgatgcgggtccaactattgaagcgaatattgatgagttgcgtgcagtcaaagaaagtcaactcttaaacgtcaaaattactaatgaggcaacagtgggtaaaacacaataccttgttgccaatgataattaccacgactatcgggccatgttattgaagcttgatctcgtagataacactttaaatttaacgcatgaacaagctgaaaaactcggtgtacaagaaggtcacgctgttcgtgttttatcactaaatcctatggaagtatcctgatgtcaaactctttatttataaacggtgtctggttacaaggcagcggtacaacatttgtaaaaacaaacccggttgataaccaaactgtatggtcaggcgctgaagctacggctagtgatgttgagaaagcttgccaagctgctcgtacagcattcccagcgtgggcgcgtttaccttttgctgagcgtgtggcgattgtagaaaagtttgcagctttgcttgaagaaaataaaaagcatttagcggaagtgattagccaagaaaccagtaaacctttttgggaaacattaactgaagttcagtcaatgattggcaaggttgcaatttcgattcgtgcttatcaccaacgtaccggtgaaagctcaactgaaatggcagatggtgtggcatctttacgtcaccgcccacatggcgtacttgcagtttttggtccatataacttcccgggccacttgccgaacggacatattgttcctgcgttacttgctggtaacacagttgtattcaaaccaagtgaattaacgccttggactgctgaagaaactgtaaaactctggcaacaagccggtttgccaaatggtgtaatgaatttggtgcaaggtggtcgtaccacgggtgaagcgctagctgcctcacatgaaattgatggcctgttatttaccggaagcgcaaacacaggttatcacctacacaaacaaatggcgggtgctcctgagaaaattcttgcgcttgaaatgggcggcaataatgcattgattatcgatgaaatcgaaaatatggatgctgttgttaacctcactattcaatctgcatttgtttcggcagggcagcgttgtacatgtgcgcgccgtatcttggtaaaaaatagtgcgcaaggcgatgcatttattcaacgttttgttgaggttgctaaaaacttaaaagttggtcgttggaatgatgagcaacaaccatttatgggcggcgtaatttcatcggctgctgcaacaaacatgatgaatgcccagcaaaagttgcttgagcttggtgcaaaaagcttgttgccaatgacacgtcctcaagaagacagctcattacttactccaggcattattgacgtaacaggtgtggcgggtattccagatgaagaatatttcggtccgcttaccactattcagcgttatgacagttttgatgaagcattaaaaattgccaatgcaactcgtttcggcttgtcagttggattagtttctccaaaacgtgaattgtttgatgacttactcattgaagcacgtgccggaattgtgaactggaacaaaccattaacaggagcatcgagtgcagcaccatttggtggtgtaggagcttcaggtaatcaccgtgcgagtgcattttatgctgctgactactgtgcttggccaatggcttcactcgaaagtgaaagcttgacgttgccagaaaaattatctccagggattgtgttgccttaacactagggaaagaaaaaatgaaaggatatgaagtaaattttgatggtttagtgggaccaacacatcactatgcgggtttgtcttttggtaatgaagcatcgaccaaaaaccgcaataatttgtctaatccaaaattggcggcgaaacaaggcttattaaaaatgaaagctttggctgatatgggcatgaaacaaggtgtacttgctccgcatgagcgtccacatgttccgatgttacgccgtttaggttttactggagatgacattagtgttgtggctcaagcaatgcgttattcaccagagctactgtcatctttaagctcagcttctccaatgtggactgcaaatgctgcgacagtttcaccttcggctgatagccaagatgagcgtgtgcattttactgcggctaacctgaacaataaatttcaccgttcaattgaagctgaaactacaagccaagttttacaagcgatctttaaaaatgaacgtcattttgtacaccatgaagctttaccgcaagtggctttgttcggtgatgaaggagcagcaaatcacaatcgtttaggtggtgattatgctaaacgtggtattcaggtgtttgtttatggtcaacaacatttaaataatggcttaccgggaccaaaacgttatccggctcgtcaaacgcgtgaggcaagtgaagcaattgcacgtttgcaccgtttagatgatgcacatactgtttttgttcagcaaaatccggatgtaattgatcagggcgttttccataacgatgtgatcgcggtaagtaaccagcaggttttattccatcatcaacatgcctttttaaatcaagatcaggcctttgctgaaattcgtcaaaaaatggcaagcatcggtgaagactttatttcaattgaagtgcctgaaaaccgtgtgactgtggacgatgctgttgcaacatatttatttaatagtcagattttgactcgtccagatggcggaatgaccattgttgtgcctgaagagtctcgccaaaatgctgcagtgtggagctatttgaatgacatgattcaaatgggtacaccaattgatgcaattcaggtttatgacttgcgtgaaagtatgcgtaacggtggtggtccggcttgtttacgtttacgtgtagcattaaatgaaaccgaattaaatgccgtaaatcccaaagttctcatgaatgatcaattgtttatgacacttaatcagtgggtagataaacactatcgtgatcgtttagcacaagaagatttggcagatccgcatttactcatggaaagccgtatggcacttgatgaactgactaaaattttaggtttaggttcggtttatcctttccaaaaataatgaggaggtgacatgcaagattttctagcattaaccttacaaggtgagcaacctgcaacgcgtgagggaaaacaagcaaatttttcttggcgttggttaggtgagggacttcttgaatgtacaccacatgcgcagtacgacaaagctgtcgtactgtcagctggagtacatggaaatgaaacggcaccaattgaattgctatctcatctttgcaccgttttatttgccgggcgtttaaagcttgcggtgagattattgcttgtattgggtaatccctatgcgatgcgtcaaggcaagcgttatgtacatgacgatgtaaaccgtatgttctgtggtgggtataaaaatctgcctgtaactgaagaatctaagcgtgctgaggttttagagcagactgttgccactttctttcaggaaagttcgagtcaggcaaaacgttatcattatgatttgcacacagcaattcgggcttcattattaccaacatttgctttatttccatatcaaacgcatagctatgatgctgatctaacggcaagtcttgaagcagctgatttggatgctttggtttatcataatgcggtaggtaaaacgtttacccattttacgagtgagaattttaaggcggcgagtgcaactttagagttaggcaaagcattgccatttggtcaaaatgacttgagtcaatttgcttcaattgatgaagtcattcgtaacgtggtttctgagcaagctttaccagtgcgtaataaaccaaaaattcgtgtgtttcaggtatctgactctttaataaaaagagatgaagagttccacatgaatttatctgctgaggctccaaacttttcaacttttactaaaggcgaaatcattgcgactcagccttctggtaactatgtagttgaacaagatcaggtctggattttatttccaaacccgaatgtgaagatcggtttacgtgcaggcttggttttaactgaaacaatctgaataattaattttagacaaataaaaaaagggcgatgaatcgccctttttttattgctaacttaattagttagtaccgaaaagacctttaataaaagatttcttttcgcctttttgtgtagacgcttgagcgcctgcatttacgtttgcatttgcattaataccagcaacattaacaccaacgtttacacctgtttgagcgttaactccatgagctggttgagctgtatttaattttgcttgagcatcagctttagtgtcagcaacgaattctttttgctcagcttgattttgtgctacacgagctttaacagcatctacacgtgcttgagcatcggcctgtttttcagcagtaaattctttttggtcagcttgtttttctgctaccttagtttttacagcatcaagatgcgcttttgtatctgctttagcttcaactgctaggtttttagtgccagttgcagccttagtcgctaaattttttgtacctgttgctgcttcggtagcaaaatgtttagtaccagttacagcttcacttgctacatgtttagtgccagtagcagctttagaagaaagttcagttactttacctgttgttttttttgtagctttaacggttgtgtcagcagctacgtgaccagcatgttttgctgtgttccctacagtatgtgcagtatttttgactgtattggctacgccactaacaagaccacctggttgtacgttgacttgagcagatgcacctgcattaacgcccgcactttgtgcaaaaatagaggcagaagcaagtacacttgcagtaacgatagctgttttcatcattttcattgcgatatccttcaaagaatatacccttttagtgaggtatttcataaacgcaatcgcatcatagctaaggaaatatgagcttgggaactcacttcatcaaaacgttacaacagtgttacattgagtaaacagactagggataaattgtgaagattaataaaaattaataataaagtgaaaaagaacatttattttttagttattcttattaagctggtcctattttcatcttacagctttttaacctttatctcctaaatttttctatcgttgttcatgtgatacatgcctatatctctaaatgtgatgtagttctcgttatttgttagaggaaacggcataataattgcttattatgagaatagggtgctttttagcacttttttgaaccttattctgccagaaatataaacgtaaagggcagaactgtatttttgcttattcgagaaaagatattttagcttttctcatgtttatacattttacgaaatagaaatttcacatgaaatgtaactcaagaaatgtctctttatttcgaataatcaaaagtaaatatagatgtctataaacaaaagaacagagatcttaaatgatgaaaattatagcttccctacttgtaatagtcggcttgatcgccgttgttctttatttcaaacccacaagcggtgcatctgatgtgttcaattctgctttacatgagacgaattcaccgcaaacagatacttcatcttccctttctaaacttaaggagcctactcaacttaaaaacgtatctttaaattcaaaccactctcaaccggtatcagcagatgccgttcctttctatgacacaaaaagtgatccttcgattcaaccgattgatccagaaaaagatccagcaaatgaaataaaagcgaaataagcaaattgttagttgaaaaactacggagaaaaataatgcaaagtaaaacgttgtttctattaggtctatgtacaattttcagtacaactgcgtccgctcttcctttggactccaaaggggccaaacagcggttaagtcaggcagcaaaacaaaaagtattccaaggtaaaatagatttagatgctttggttagtaatgattcaaacgatttaattgtcgaatacaatattccttcatcgagcgtaccttcaggtttagaacggcgaagttatattgctacaaataaaaagaatcttcagacaaggtttaatcgtgccggtggtgtacaagtacttcgggattacaataacctacctttggctttttatcggattagtaaccgtgaggctttagtagctttattaaatgatccgaacgttaaagcagtttatccaaaccgtattaaccgtactacaactactgaaagtttgcctttgattaatcaaccacaagccaataccaatggttttacgggggagggatctagtgttgctgtgctggatacaggggtaaattatctacattcagattttggatgtaccgctgtgaatactccatcgagtacttgccgcgtggtttattcttttgatagtgcaccagatgatggcactttggatgatgatgggcatggtagtaacgtttccgctattgtgtcgaaagtcgctactaaaactaaaattattggtattgatgtatttagaaaggtcagatcgcaaggtaagtgggtaagcaccgcttatgatagtgatattctcgcggggattaactgggctgtaaacaatgcacaaacctataatattaaagcggtgaatttgagccttggtgtgccgggagtcaaatatacctctgagtgtagcgatagcagttatggaacagcatttgccaatgcgcgagctgctggcgtggttccggttgtagcctctggtaatgatgccttccctgacggaatttcatctcctgcttgtgtggcaggggcagtaagggtaggtgctgtttatgatagtaatattggtggtgtgtcatggggtaaccccgtgaaatgttctgaccctactacagcagcagataaggtagcctgctttagtaatgggggaagtcttgtgactttattggcaccgggtgcaatgattaccgcaggtggctataccatgggcggtacctctcaagcgacaccacatgtggcaggcgcgattgctctattgagagcgaatagcgtaagtccaaccgaaagtatcgatcaaactattagtcggttaaaagctacgggtaaacctattactgactcaagaacgggcctggttttcccacggattgatttgctggcggcaaccaatggtttaaccgttaactaaatagcatatttataattttttattaggtccaaaaatttaaatggctatggctcgttgcaaaagataacttctgcaacgagtttttttatgaaaaagccttaatcacactttgctaagttgtctttactaaaattactttgaagttttttgaagttattttgaatttcgggatcttggatattaaaagtggtagagcttttggttgtcgaattggtcgcttgacttaatatgccagaagagtctggatattgttctgtaaatgattgagctgaaatcagacctttattattaaaaatccaatgttcagttacttgtccaccacctaaataacccgtaaattcaatcatacaagcttgcttatcgtgtttaataagcttggctacattgcctgtggtggttggataagcttcgatattggtatcttgttctaaaacttgtgcctgaggataagaagaaagaggtgcggtagttgcacatgcagttaatgctaagcagcacagggtagaaaagagaagtttttgactgttcataaggcaggttcctagctctttgtagtggatgtatgtcttttttaaagtgtgtttctttggaagcgcgatatgatcgcgctaatctggtttaatcttaattggcagtcgtactagatttacttagctcaccttgttcgattggaatattttcaccgtttctactgctggtgatattttgcttagcttgttctattttctgttcagtaaatactttggctgtatccgttttttgttgaacaacttctgctttttcggcggtaaattctttcgtatctttccatttttcactaattttatttgaagttttttcagaagcgccttgaatggaatctcctaaattttgaattccttttcctgttttgtataacagtacgcggcctaagcttggattatcgccataaggcattgtcttagaggttgcttcattcacttgttgaggttgaggtgtttcagcaaagagagatgatgaaaccaagatagagcttgtaatacataaaatttttatggctttcattttggattaatctccccaatgactatcaaaatatggatagctgatcttactgttaaaaataaatcttgtgcagacatgagataaaacccatacgattcgattacgagaaatcatcatttgaagggaatagcatcattacccaaatactttataaacaaaactcagacttaatcaattctataaacatgtctctcgctttatggttactcacatttttatgccagaaaaaatgattttgcataaaggcaaggtattcgaatttataactttgaatatgcgctaaatttttatattgctcataaatactcttaggcactaacgccacgccagaacccgcactgacacacccaataatggtggcgtaactggtaatactggtgatagggagagagatattcttcagtttaagccattcttcaagagctgcgcggtaaggacagccttcagtccacataaaaatttctttaccaatcagatcttcttggcaatgaatttctcctaaagaatgagatgcaattaagaccatgtcttcttgataaatactcagtttattgagcataggaaactcaatattgcctgcaacaattgcaccatcaagtttgtgctgagaaatatcgactagtagctgtttccatgtgccagtaataatttgaatagaaacttctggataacgttgatgatattttgcaagtaagttaggcaggcgagttgtagcagaagattcaatagctccaattttgagcgggccagagggcggtgcatctggatgaatacttcgtttcgcttcatcgcatagcgctaaaattttatggcaataatcgagaaagatttctcctgatggggtgagttttaaagctttaccttcacgataaaacaaaggtgctccaagctcttcttcgagttgtttaatccgtgtcgtaatattggatggtacacaatgcagttgcattgatgcctttgccattgttccgcattcaaccacggtttggaacatctttaactgagcgatatccatgttttatcattcacttttaatgaatattaaactcaatataagttaattttattcaactatccatgcgcatatgatgaaagagttccatttcattagtgcagatttaacatggcaatttctcttgctgccgaaacccagcctcccgcatttaagctctacttatgtattgctgtaaccgtcttttgttggggctattcacctattggtgtacatagtgctttgcattcatatacaccgcagcacattgccttgcttcgctttttgattgcatcggttttcttgctgcttttggttatgaaaaaaggaattcagcctttaaagtggaaagatgttcctgcacttgctgtattagggtttttttctgtaacgctgcatcatttgctgataaatacggggcagcaatatgtaactgctgtcgcatctagtattttgagccaatctattccgctatttacctttattatttcggttttgctttttaaagaacaaatcagttttaaaaagtggttgtgtattttgctagggctttgtggcgccgtgttagtggtcagcggagatcatggttttggtatgccgagcccttatagtttgttgattgttttagctgcaattgcatgggggctttattttaatttatataaaaaatttgccttaaattatgatgccttgagcatgatgtgctacatcatttggttcgggacccttcctttactattttatagtgctcatttacctaatgaaattttacatgccacttggcaagccaatatgtcggttgtcttattgggtatttttccaagtgcgatggcttatgtactttggggctatgtacttaaaaatatgccgttaacgattgcatcgaattttttatattgctctcctattgtcgcgatgaatttggcggtgattttcttaaatgagaaaccatcaatgatggtgctgctgggaggagtaattattgtgggaagtttagtgtggatgaattgggggaatcggcgtactatcgaataagctatgtcatgcgctacttgctttaagagaatgagatgattgttgttactttaacttataaaaaaccgttagccgaagttgacgctgtactcaaagaacatattgcatttttagatcattactatgagcaaaagaaatttctggcatcaggtcgccgtgaaaatagagtaggtggggtaattttagttttaagttcttctattcaagaagctgaaaaaattataaaaaacgatccgttttatattcatgatgtggccgattatgattttatgtggtttgagccatcgaaaagtttagaagaaattaaagagtttgtttaactcaaaaaataaagggatctataaaagatccctttatttcataataagctaattaaccctgcaacacactcacatcagcaacagcagtaaacaagttacgtaactgagccaataaacgtaaacggtttgctttcaggtcagcgtcatctgccatgaccattacaccatcaaagaatgcatcaatcggcgcacgaagtgctgcaagcttagaaagggcagcagtatagtcttttgctgcaagtaatggttcaaccacaggagtcactgcttgaagctcagcaaataatgccttttcggcatcttcaaccaagttcgcttcaattacagagccttctggtgctgcttcttttgcaagaatattagcaacacgtttatttgcagcagcaagtgcagcagcttcaggtaatgtgcggaagtggttaacagcatttactcgcttgtcaaaatcaagtggagattttggtgcaagtgcttgaactgcttgaagtacgtcaacagcaacaccttggtcttcgtacttagctcggtaacgaccttctaagaatgcaaccgcatcagcacgagttttgtcgtggtctttaacgatatcgccataaccttgaagtgcaagattaactagctcttcaatcgttacatctaattcattttcaatgattaaacgtaagataccaattgctgaacgacgaagtgcaaacgggtctttagaacctgtaggcgcttgtccaataccaaaaataccaacaagcgtatctaaacggtcagcaagggcaatagttgtacctgttttggtttttggtaaaacatcacccgcaaattttggtaaatattgctcacctaaagcttctgaaacttcagtgttttcgccttcaatacgcgcgtagtaagtacccgcaataccttgaagttctgggaattcaccaacaagctcagaggttaagtcgcatttagcaagtaatgcagctttttcagcatcagctgggtttgcaccagtgattgaagataatgcaactgcaagttttgcaatacgtgttgatttgtcccaaagcgtaccaagctgtgcttggaataccatgtttgctaatttttctttacgagatgcaagcggttgcttttgatcttgtaagaagaagaactcagcatcagacaaacgagggcgaacaactttttcgttaccttcaataatttgagtcggatctttagactcaatatttgaaacagtaataaagtaaggctgtaatttaccttccgcgttgatcaaacagaaatacttctggttgtcttgcattgtcgtgatgagtgcttcttgaggaacagctaagtagcgttcttcaaaagttgcacgtaaagccacaggccattcaaccagacttgttacttcatcaagtaagtcagctggaacaatcgcagttgcattcacttcatcagctaactttttcacttgttcttgaatggttgcctgacgcttttcaaagttcgctacaacatatgctttttctaacgcagctaaatagtcatttgcatgcgctaaggtcacagcttcaggtgcatggaaacggtgaccataagtcacattaccagctttgtgatcttgaatagtcgcctcaataacttggtcatctttgagtaagacaacccatttcactggacgtacaaattcggtacggcttgcagcagaacgcatgcgcttagcaattggtaaattgtctaacgcagtttgtaaaatctgtggaagtaaagcatcaaggctttgacctttcacatcttttaaatagcaaactttttcaactttacctgcttggaatgtagaaagctgatcaacagtaatgccttgaccgcgcataaagccttcaagtgctttagtcggtttgccttctgcatcgtaagctgcttgaacagcagggccgtcaaaacgtttttgtgtatccgcttgagcagcatctacatctacaattttaagcgctaaacgacgtggagctgcataagcttcaacagatgcgaagtctaaacctgcttcatttaagccttttacagtttctgcttgtagtgcatcacgtaacgtttttaagctttttggtggaagctcttcacagccaagttcgaataaaacagtatgtttgctcattagtttttctccgcctttgctgcttcactttcagcttgtgcttttagctgtgccaatacttcatcacgtaaatgcggttctgccattgggaagccaagctctgcacgtgcttgtacataactttgtgcaatagcgcgcgccaaagtacgtacacgtaaaatgtaacgttgacgctcagttacagaaattgcaccacgtgcatcaagcaagttaaaggtatgagacgctttaacgacttgctcataagctggaagtggaagtttagcttccattaaacggttagcttctgactcgtagaaatcaaatagttcaaatagtttgtcaactggagcgtattcaaagttataagtcgattgctcaacttcattttgatggaatacgtcgccgtaagttacagtaccgaattggcctttcgtccaaacaaggtcataaaccgagtcaacgccttgaaggtacattgcaagacgttctaaaccgtaagtgatttcgcctgttactgggtaacattcaacaccaccaacttgttggaagtaagtgaactgagttacttccataccgttaagccaaacttcccaacctaagccccaagccccaagagttggagattcccagttgtcttctacgaaacggatatcgtgagtaagcgtatcaatcccgattgcttttaaagaatcgagataaagctgttggatattgtctgggtttggtttaagtactacttggaactggtaatagtgttgcaaacggttcgggttttcaccgtagcgaccatcttttggacgacgtgaaggttgaacgtatgccgcgttccaagtctctggccctaaagcacgtaagaatgttgcggtgtggaatgttccagcgcccatttccatgtcgtaaggttgtagtacgacgcagccttgttcggcccaatagttttgtagggcaagaattaagccctgaaatgtatcaatgtgcgagatggcgcgactcatgtagcatccacgaatttatgagaaaaattgccactaagtataaggattttgtggtggagtggcaaaggcttaatcaagggaatacatgattcggtcatttgtttttctggcttagccactttaagcctaaccaatagcaaaagcctgtaaataagatcatcagatagaaactgtagatcttataaatatgccaccaaggggaagggaatgatccgacaaaaatcaaatgtgtaatagggccaatcaaaatccagatcgcagttgtgctgatgaaaatactcatcagatttaaacgatttttacgggcgagaaaataggaaatgatatatacaaaaggaataaccagaaggccataaaaaagtaaataaaataagaagtgggctagaaaaacaactccaatcgaataaaggttgaactcagcatttaatattattacccctaaagcagataaactcagcaatgggatgggtgcaagcgcaagtgcgtgaataatcatttttttgttatattgaagcatattaaaaattatagaatcgagaataaattatgctgaaattttgctgcaaactcattgttttatctagcctttttggtagtccatggttgtatgcgcagaccgaagctgacgagcaagacgagtacaaccaatgtgtagatcagactattaaagaaatgcagcttgagagtattaacaatatggtcgtgcatagctgttctgaacaagctaaaaagacttatgaagaaaaaattgttgctctgattgatcaaattcgtacacaaagcgaagaatataaacagccagaacgttaccaagatattttaaaatctcaacgactctggaaagcttatgtagatcaggaatgtaataatgcaggctcatacattggctcacccatgtattcgtattgcccaatgcaagagtatgcagcgcgtgtaaagcagcttgaagaatacgttaattaagacgaattattttaaacgtcacctcatgacgctgagcgtatttcactggattaaatttaagaatgcgaaatgatattttttaaacgatgccataaatgagtcgtttgatatgtctgatcgcattcgagaaaaactacaaattcttgctgatgctgctaaatatgatgtgtcttgttcatcaagtggcagtgatcgtaaaaacaaaaataaaggtctgggggatgccagtcattcgggtatttgccatagctataccgaagatggccgctgtgtatctctcttaaaaattctatttagcaatgtgtgtatttttgactgcgcctattgtgtttcacgccgttctaacgacgtccagcgtgcagcatttacggtgcaagaggttgtagacttaactattaatttttaccgccgtaattatattgaaggcttatttttaagctccggcatatttaaatcggccgatcacacgatggagcgcatgcttcaagtcgtgaaaaagttacgtcttgaagaaaattttaacggttatattcacctaaaaacaattccgggtgcatcgcctgaactgatccatgaagcaggtttatatgctgaccggatgagtattaatttagagatgccgactgagattgggttaaaaacttttgcgccagaaaaatcacatcaggaagtacaaaaagatttaggtttagttcgtgaccggctcattcaactgaaagatgagcgacaaattattaagcacgtgccgaaatatgtaccagcagggcagactacgcaaatggttgttggcgctcatcaagagtcagaccaagatgtcttgtttatggctgacaaacactataaagaatttaaactcaaacgtgtctatttttcgggttatatcccaattaatactgaaaataattatttgcccgcagttggctctgcaccgccattattgagggaaaaccgactctatcaaagtgactggctgatgcgtttttacggttttgaagtcaatgaaatcgtcaatgaaaaacaccctaacttagaccttgatgtagacccaaaattaagctgggctttaaggcatcctgaacagtttccggtagatttaaaccgtgcagattatcaaatgattttgcgtgtaccgggcattggtgtgaaatcggccaagaaaattgtgcaggctcgccgttttgggaaaatccatatcgatttacttaaaaaactcggtgtggcctaccaacgagcaaaattctttattcgctgcgaagacagtccaaaattccaaaaagagctatcatcaagttttattcggcagcagattttaactcagggatcttctaaatatgtgcagcaactctcgccacaattaagccttgggttttagctatgtttaatgaggaagtagcttactattttgatggttcaatggttgggctgctgagctgtgtatttcgtgcatttcaatttaaagaattacaggtcaggctctgtttgaatgatgcagctcaacatggcttatttgctgataaaattgaggtttcaaataacgagcaacacgccgagcgtgtttggtccgcgctacaaaaaaagctttcatcttcttccttaaaacaattttattttgcctctttatctgaatctttagacgcctatcagcatttatttaattactgtatttatgtgtttagtagtcattcttctgtagaaaaagattattcacatcccagtgttttagcgattgcacagtggacgaaaaaggtcgggcgtgagaagcatcgaatggaggcttttattcggtttaagaaaaccaaagatgagctttttttaagtctggttcgtcctgattttaatgtcttaccactcattcagccgcattttaaacggcgttatcaagatcagcgttggctcatttatgatgagcaacgtaaattcggactgtattatgatttacgggaaatacatgaagtttcactcgaagcctcagacgttgaccgtaatttaaaaaatggaatgagtcaaagctttcagcttgagcttgatgagcaggaagttttatatgatcagctttggaaggattattttaaaagcgttaatattacggaacgccaaaatattaagcttcatgtgcaatatttgcctaaacgttactggcgctatttaaatgaaaagttaattgaatattaaaatattaaaatagtaagagcacattcaacaggttttctgataattgaaagatataatttaaatgcactttatgtggctttgggcgtatacttttgcccgttataaataacggcatatcccctaaggtgtactgtgagtgttatacagccagaatggttacagattttaaaaccgaattttaaggttttacccctaaaagaacggttgctttgtggcgttggagcgctatgtggtttagcaatttcctcgttaattagctggtatgttttaggcggaattaatgcttggtacattgcaccaatgggggcttcatctgttctcttatttgctgtacctaccagtccattggctcagccttggaatgttattgtcggtaatacattagccggaattattggggtcgcctgtgcacagtggattcctgatttaaccacggcttttagcgtggctgtgggttttgccatatttttgatgatgactaccgactccttgcatccacctagtggggcagttgcgattacggctgtgttgggcggtgctgctattcataaattaggcttttatttcgttttttatccggttctgctcaattcattacttctactcggttttgctgtattttttaatcgattgattgggcgacattatccggttactgcacatttaaatgagcgtagtaaagatccaactcccactcaaaaagtatcaattcagccaaaagatattgagtatgcgttagaacatcatactgaactgttagatatcagccagtacgacttagaaaaaatcattttagaagcgcaagaacatgccaatgaacgtatggtgaaccaatatacctgtcaggatattatgagccgtgatgtgattaaattgcatgaaaatgatgatattcatcaggcattagataaatttaaacaagaaaatctcatgagtttgcctgtagttaatgcagacaaccatttagtgggtactttggcgttatatgaagttgtggaatggtttaaaggggcaacagacccaagaaactcatggcagcattacgtaagacaaattatgagtcgtcgagtagttactgtactgccaactcagccgattcaagaccttgtaccttactttgttgagaagtcttttaactatattccggtggttgaggaacgaaaactgattggaatcattagccgtgcagatatgattgcggctttacaacagcagttaaatcgtaaattgtaattttaaacataaaaaaagctacggttgattaggggatgcaaccgtagcgaccaaaataaactaagttatttaatgtatttgttcttctcgtacagtgcgaacaggttgttgataaccttgtacttgttctggctgttttttaggaattaccaaccataaaactaagtacactaaaatccctggaaaagccgcgctcattatcgaaactaacacgaaaataatgcgtaataaatttgcattccaaccaaatcgttcagcaataccgcccattacaccggcgatcatgctttgtcggttcgagcgatataaaccagaattggccatctaagtctcctcaaatatataagttacaaggaatcatttattcacttggttaataagaatatggagccaatccgaatgaattaaaggttcacaaaactaaaaatggttaaaatatgtaaatggtttaaatcaatgaaagcaacatctactaaaatgcactgtttcggggctgaaagtgtttgtagcagcgatgatatcgttcctgaacaataaggttgaactgtagcattgctgttgtatgtgaatgatgtatatgtctttgaagtcgtctggtcttttaatgaaacatttgggtgtggcagccatcttgtgtatggggttaagtgcctgtgatgtaaatcatgccgactctaaagatcactccgcggtagcaacgacttctagacatgaagatagtttgattaaaagcaccactaaggttaaaactctagatgatgcagcgggacgaactttcttgcctgagggcgtcccagatcaaacctcaaaactatccgaagcagaccaacaatatgcaggccgttatcatactcgtatttcatgtgaagataattttgccgattgtgaaacaggcgaggcagaatatattttaaatttattacctgatggaactgcgtattggaatgttgttcattttggtcgtgttggtagtaaagatggctcaaaaagtgcagtcatcaatcaattatgtccttccttgaaatggaaggtcgaacctgccgttcatgagttaacgattcaatgtcctttatcagatgttaacttctattttgatattgatgcaaaacaaagattagtcgtaaatttagaaaaattattttatagcgattttggtaaaaaccgtgagtttttggaacaaaattattttgttcctacaaaagcttatgtacttgataaagagtaaagtcaattttagcaaaatcaaaaagagcgcaatatcaattgcgctctttttgattttagagtctatacatcattagtagtcgaaactaaagtgttccgctggtaatgaagtcagcgtacgagaagtcgttaccattgactctgcatgaccttgagcacgtggtaataaacggtcaaagtagaaatctgcaactttaatttttgctttatagaactcaggagtttcttggccattacctgcttctaatttttcagaagcgacaactgcttgttgtgcccagaaataagccatcatcacatagcctgagaacatcaagaaatctacagaagcagaagatacgatgtcacgatctttacgtgcagcaagcatgatacgaacagttaaagtgttccactgagcacaaagctttgttaagtcccaagcaaaacgacgtaagtatttattacgcgcatgtgcagcacagaactttaagatctcagcagtgtattcacgaactactttaccttttgagcttaacaacactttacggccaatcaaatcaagtgcttgaacaccagttgttccttcatacagagtagagatacgggcatcacgtacgatttgctccataccccattctttgatgtaaccatggccgccgtacacttgcataccgtggttagcagcttctaggccaagctcggtcaagaaaccttttaagattggtgtatagaaaccaagtttatcgtcataatcttcaaatgcagcttggtcaccgcgtgtcaaagcatctgtcattttgtcagcaagctgtgctgcgtagtagatcattgaacgaccaccttcagcgattgctttttgagttaacaacatgcggcgtacatcagcatggtgaatgattgcatcagcaactttatctggatcttttttacctgaaagggcacgcatagacatacgttctttggcatatggtagagcgccttggaaagataactctgcatgggcaataccttgaaccgcagtaccaatacgcgctgtgttcataaaggtaaacatggcatgtaggcctttatttacttcaccaatgaggtaacctgttgcattatcgaagttcaatacagcagttgcagaagcacggatacccattttgtgttcgattgaaccacaacttacagtattacgttcacctacgccgccctccgcagttgggataaatttagggacgataaataatgaaataccacgagtacctgctggtgcatctggaagacgtgcaagcacaatatgaataatgttttctgttaaatcatgctcaccggcagaaataaagatttttgtaccagaaatcttataagtgccgtcagcttgtggttcagctttggtttttacctgacctaagtctgtaccacattgaggttcggttaagcacattgtgccgctccatgtaccttcaacaagtttcggcatatacgtttgtttttgctcatctgtaccgaattgcaaaatagtattcatacagcctgaacttaaacctggatacatggtaaatgaccagttcgcagtacccatcatctctgatttaatcaggtttaaagacattggtaggccttgaccaccaaattcttcaggataagaaagaccttgccagccacccattacaaactggtcataagcttctttaaaaccttttggcgttttaacttcgccgttgtcaaaatggcaaccttcttcatcgccagattggttaagtggagacaatacgttttcacaataatctgctgcaccttcaagaatcatatctactgtatcaggatctgcactttcaccatttgataaagttttgtagtgagcaggatagtctagtacttcattcattaagaagcggatatcgtgtagcggagctttatatgctggcatggctttaatcctaattttgaatcattgtgggattatctgaatcgatgatttgattattcactcgcatgataaaaatacaatgttaatcgcacccgaaaggaatgtcagaaaagcgaattttgtcgaaaataaatacacctgaaattataatttctgctaaagtcgggacttatacttttatgtgaaaaaacaactaatttttttatttttagcaagttttgttaaaaagataaagcgataaggttttaaaaaaggttatgcatttaaaatatctcagtttatgtttatttagtttgggcttgacggcatgtgcacaacacggcgtgcgtccacaggtggcatctgcgagtttagagcaaaaagccattcaaagtgttaatgcgatgtatgaatacccaagttatgattatcgcggaaactttaaaattaccgttgatccttcacaaataaagcaaaatgtaaaagctgagaatactgctaagctagatgctgaattacaaaagaaagttgatcaatatttacgtgaacaaaaagttgccttaagtaaagcacagaaacaaaccttatatacggcgattgcaaacgaacaaggtgatttgggactgacttcctcagcacgttctgaaaaaattaataccgtattatttaatttgttaaatgatcttcagtttagttatgacggctcgatacattatcgtcaaaaaatgggttcatttaatttaactgctagatatgaaaaaccgacacttttagttcaggcaaaattgccaatggtgcttgatcttgagaattataagttttacataaattattttggtttgatgccatatttggttaataaagataatcaaaataatttggcttatgttgatttctcaaaatataaagccttctttaaaaatgtcgataagaagaaatttattgaataccttaaagcttcaagtgctgtttcataccgattagctgaaccgcaaaacctacaacgtgtatcgttgactgaggctgatcgtaaagcaggggcggttgaaaaaattcgtttaaagacgacggttgagcaactacttttagaagtagatttgtttgggcaagttaatgaaaaatatcttcaaaaaagtgttttaggtcttgatgaggaaaaacttgctgaaacgcttgccgcagagattgctgcttctgatgcgaaaaaaggcactgctggtaaagaagaacaaaaggtttcttctgatgacgccgctgctgttagccaacagttgtactcccttgttaatgctcatttaggcaatacttctacttctgaagatgaggaaatagagtctgcttctagtgaagaggcgagtgatgtagctgtagcagaggccgagcaaacttcagaaaatgaagaggtagttgcactgacggaagatcaatgtattgaattaaaatcacttaaaaaaccggtcgctttaggggatattaattattgccaaatctacggtattgatgttctagatcagagtgatacaagtattcaaaaagcgcaaatcaagtctcgtcaggacgctttaaagcaaacttttgaagcttataaccaaaaccagtttattaatgatgaagcattcaaagctctttggttaaaacataaggatgaaattgaacaagctttaccgaagcaaagaaacccaatcacaattgatgtggctttagatgacaaaggccgtgcagtcaatatggattacgatgttgattatacgccagctgagtttaagcaccgcttcaatattaaagcagatatgcaaattctgaattatgggaaagcgacttcaattgatcagcagcagcttaaacaagctaaatctgtggctgaagcaagtaaaggttctatgctggaaaactttattaaaggttttagtgaaaagcttgggcaaagtgatgtttcagagcaccctgtgggcacacatagtgatgtacaagatttagatgcaaatctggctgtacttgcagataaaacctatgatgcaacgcatgcttatgataaaacttataaagcagtatttattgccaaattgactgccgaaaaaccgtcatatattaagtattattcagttcaacaactccaagaaattgctgaggtttatgcttactggttctctgatgaagatacatataatcctcaaggaaaagccttagagcgtattaccgctttacagaaaaaacatcatcttgaacaagatgatcagtttgaccacgagttaggacgtgctgtagatcatattgtattaacaactatacaaggtaaaacagggcgtgaagcttggcagaagctacagaagcaatataaacagccagcccaacttttctcaaaacagtatcagttagagtttgaaaaacaaaatggtgtttctgctgaagaaaagcatctgttatcagaaacggctgatattttagggaatgtttatgtggctgctcgtaaaaaacagctttcggaaaaaacaattcagaacttaaaacctgaacataatgaatttatcgattatgaaattttccgtgaggtttataagcaaatggttgccgctagaaaataataagtaagataaaaaagaacctacatatgtaggttcttttttggtttatagaaaatcttttaattgtggtcgtacattattccagatagagaaggcttcaatagcttggcctactaacatgccaaaaccttccgcataaggcacattacgctgtttcgcttgatcaaggaaactagaaggtttgccataagccatttcataggcatatttaaattttaatttttcaggtagttgtaaagcatcgcctgaaagacttgccgaagttgcattaatcacaatatcaaaatcgccttctaaatcatttagggaaattgcttgtaattgggcttgtggaactgctgtttttaagtcatctacaagttgttctgcacgagctaaagttcggtttgcaatgacgatttttttggcaccagcctgtacaaggggataaataacaccacgcgttgcgccgccagctcctaaaattaaaatagttgtattttcaagattccattctaaagcttgaattgcggcaactaagccttggccgtcggtattgtcaccatgcaatttgccattttccatccataaggtatttacagctttagcaatttgagcacgctcggttaacacatcacataaagcaaaagcttgctctttaaaaggaacagtaacgttcataccactgccgccttttgcaaagaaacttcgcatgctcgattcaaaaccgtcaagaggagcaagccgtttttggtagtttagatcaacacctgttttttcagcgaaagcatgatgcaattcaggagagcgtgattgttcgatcggattgccaattactgcaaactgtttggtcattcttgtatccaaaattttaaaatggcatgaagcagatagagcctgcactgaatattcagcaggcctcactataagtcaaaatagcacaagaaaaaatatttgaatgaaggcaaatagaaatcaaaaaaggagattctttagggtggaagccaaagaatccccaaaacaaaaaattaggcgactttttcttctaaacctaaccaatcacgaggttttaaatagtagtcagttaaacgcttctctggagagtcttcatcccattcagggcgataagaccatgcagctagattaggtaagctaactaaaatcgactcaatacggccacctgtttgtaatccaaacaacgtaccgcggtcatacaccaagttatattcgacatatctgccacggcggtaaagctggaactctcgttgagcttcggtataaggctgttcgcggtgtttttcgaaaattggcaagatcgcatttaaatagccattacctactgcttgaatatatttaaagcaggtttcgaaatcccagcaatttaaatcatcaaagaataaaccgcccacaccacgttgttcatcgcgatgctttaaatagaaatagtcatcgcaccattttttatgttcagcataaacattgtcaccaaaaggcttacacaggtcataagcggcttggtgccaatttaaaacatcttgatcatctggataaaatggcgttaagtcaaaacctccaccaaaccaccaaatcggatcttgaccttcacgttctgcaacgaataagcggacattcgcatgcgaggttggaatattcgggtttttagggtgaatgactaaagacacacctagcgcttgagcttttgcccctgcaatttgagggtgacgttctgttgcagaagcaggaagtttgctaatgttgatatgtgaaaacatcacgccgcctttttcaatcactgtaccattttgcagtacacgtgaatggccgccaccgccttcagggcgctcccaatcatcaatgataaattctgctgtcccaccaccagctttttcttgttgttctaaaccggcacaaatacgggcttgtaaatcgaggagaaattcgcggacacgttgaatatctgttgaagtcggatgttgcataatgaccctcaaagatgatcgaaatagattagatacatcaaaacataaatccataaaaaaagtaagggattttttctaattcctgaaaaaatcccttaaatataatttttaaattttggactcgaaatcaaaaatcatctttttggtaaaggtgatccattctttcacgtttggtttttaaatattgttcattaaaagggttacggccgacagttaaaggtacacggtctacgacattaataccttgatctttgagtgcctgaattttcaaaggattattggtaattaatttaacttctttcacttttaagtggtcgagcataatgctgcacatatcgtaacgacgtgcatcggcgggtaaattcagtagtaaattggcatctactgtatcgtgcccctgatcttgcagggcataagcacgaattttattggttaaaccaataccgcgtccttcttggcgtaagtataaaattacaccttgtcctgcttcattgatgagtttctgagtggcttgtagttgtgggccacagtcacatttcaatgatgcaaatgcatcacccgttaagcattcagaatgtacgcggaccaaaacaggacccgttggcggattttctaaccctttggaaagtgccacatgttcttcacctgttacgggatcttgaaacacagaaatattgaattcaccaaaagcggtcgggagttttgatgttgcaatgaactctataggcacagattaactcatcttttaaccgaaaacggtttaaagtatagcgtaatgctgggagattggtcgaattgtcataatcattttgcacactaaggttttcttttttgtataaagaagacgataatagttgataaatagtcagattattcaggataatctgccaaccatacccatactgtatgagagactgctttgcatgatctcgttcgcaaatgtggctgattgaaggtgacttcattcgattgtatgatcgacccattttgacccagcttaggatttgccaggcttataaaggctttgccacatatgttgtataccgaaattccaactcaacgccctgttacgccattgttagatgcgattgatcatcctcaacaattacgtcagctcgagcatagccaattactacaagtggctgatgagttgcgtcaatatattttatatgcagcaggccagagtggtggccatttcggtgctaacctcggcgtggttgagctgacggtagcgctgcattattgctttaatacaccaaatgatcgtttagtttgggatgtgggacaccaagcatacccacataaaatcctgactggacgccgtgaacaaattacgaccattcgcgctaaaaatggattggctgctttccctgccagagaagagtctgtttttgatacctttggggtagggcattcttcaactgctatttcagctggtttgggtatgtctttggcacgtcgctatcagaaagacccatgtgaagtcgtttgtattgtgggtgatggtgcaatgactgcgggcatggcatttgaagcaatgaatgatgctgttgctcatgatgcagatttaattgttgtactcaatgacaacgatatgtcgatttcttgcagtacaggtggctttgccaaacatttagctgcaatttgggaaaaaggtcatttagttaatgtcaatgaacatggtgaagcttatatccagccacacccaaaatggacatataactctcgattacaccaatcggcaaccgatgcggcagataatttatttaaagcaattggttttgattatttcgggccttttgatggacacgatgtcactcagttggttcaggtgttcaacgcgctcaaaaaacgtaaaggtccacgtttagttcacgtttataccaagaaaggtaaaggctttgctcctgctgaagcagatccgattacttaccatgcgattggcaaaattaatgctgcttcgggcgggaaaacaccaccaaaatactctgatgtgtttggtgagtggttgtgtgatgaagctgcacaagatgagcgcttgcttgcgatcacgcctgcaatgtgtgaaggctcgggcatggttaaatttgctaagcaatttccgcagcgtttcttcgatgtcgcgattgcagagcagcatgctgtaacacttgcagcaggaatggcatgcgaagggctaaaacctgttgtcgccatttattcaacattcctgcagcgtggttacgatcagcttattcatgatgtcgcattgcaaaatcttgacgtgacttttggtattgaccgtgcaggcttggttggtgaagatggtccaacgcatgcaggtgcatatgactatgcctatatgcgtactgtgcctaatatggtgatcatggcaccgaaagatgaaaatgaatgccgtcaaatgcttcatacggcctatgcctataatggcccggctgcggtacgctatccacgtggtgcaggtgtgggcgtcgaaatccaaaaagagatgactgttcttgaattgggtaaagctgaaattgttgcagaaattaaagcaaacagtgatgagcagattacggttttagcatttggtagtcgtgtcatggttgctctggaagcagctgagcaatttgctcaaaaacatgacgtcagtgtgtgtgttgtaaatatgcgcttcgtaaaaccgcttgatgaacaaatgattcgagacttggctgagcatactcatttattcgtgacagttgaagaacacgcgattatgggtggtgcgggtagtgcagtgaatgagtttatggctcaagaacaaattgttaaacctatcattaatttaggtctaccagactcgttcttgcatcaggcgacacataatcaaatgctacaagattgtggtttagatgctaagggtattttgaactcgattgagcgagcatggcttaaggtaaatcaggtggtttaatacctcaataaaatttttcgaaacattttttcccaaaaagcgtattcatttgctaaaatggatacgcttttatgcattattctttgtcaaaatcttcaaatttgtattgtagtgggtgttcaatggaacctatggtggtgatggctgcgcgtgcggctcaaacagttggtcaagagcttttaaaagcgcatcaaaatcgtcataagctcgatttgcaagttgaagagaaaggcattgatggtcctgtaacacgtgtagatcgttatttagaacaattgacgattgatacattacgtaaaagttataaaaaccatagcttcttaggtgaagagttcggtttgcaagagggcaaaggccacgatgcagactggtgctgggtgatcgaccctcttgatggcacgcaaaactttattaatggtttccctcatttctgtatttctattgctgttcagcacaaaggtgttactcagcacggcgtaatttacgatccagtacgtgacgaattgttctctgcaagtcgtggccgtggtgcagtgatgaaccagcgtcgtattcgcgtaaatgtaaaagacagcctagaaaatacattcttggcagtaggtcacccttaccgtgctaaacgtgctggtgaaattgtgtcttatgcagagcagcactttgcttcattattagctgtgactcaagcgggtgctcaaatccgtcgtggtggttcagctgctttagacttagcttatgttgctgctggtcgttttgatggtttctttgaacttggtttaaaaccatgggatatcgctgctggtgagcttattatcaaggaagctggtggtgttgtggttgacgcacgtggtggtaatgattcacttgaaaatggtcaagtgattgcatgctcactgaaaatgttaaagacattaatgcaaactgtagttcctgcttgggacaaagctgcaaaataatttaaaaaattatttctgagtaagaccctctttttatagagggttttactttttaatggtcggtaaaatacaaataacagtagaaatactgagaaagttgattaaaacacatgacttttaaattctttctgctataatccgcccacgcacttaaatttccgttcattacctgaacattctgttctattcattgtaagcgcacgctgtccatagagaggaccatttcttgcgccccaatcgctcagcgattcttcaggttgcggccgtaatcaagcgtgcgtttagtccacatcgtcgttactcggattgctgctgaataataagattcagctaatatttgctttgccgcttttgccgatgtctatttgtatttattaaaaatggagcaccctttggggtggaactctctatgagcaaaacttttgccgaattttctttgcacgaaaccttacaacaagctcttgaaggtttaggttttactaacccaactcctgtgcaagaacaatctattcctgctgctttagaaggtaaagaccttcttgtttctagccagactggttctggtaaaactgctgcattcttattaccgacattacataatttggcaggtcaagatactttcgttccgttcaaagaacgtatgaaagcagtgactcagcctagcattttagttttatgcccaacacgtgaattggctcaacaagttagccaagacgcaattgcttttgtacgtcacatgaaaggtgttcgtattgctgcaattatgggtggtatgccttttggtaaacaaattcaacagcttaaaggtgctcaagttgtagttgcgactccaggtcgtttattagacttagttaaccgtcgtcaattaaagctagacaaagttgatgctttaatcgtggacgaagctgaccgtatgttagaccttggtttctctgaagacttagaagcgatcagtgacttggctgcgaatcgtggtcaaacgttaatgttctctgcaacttttgctgaccgtattattcgtcttgctgagcgcatgatgaatgaacctgagcgtattgcaattgaaactggtcacagcaccaatactgacatcacccaaactttacactggacagatggtttcgaacacaagaagaaacttctgactcactggttggctgatgaaacgcttgaccaagctgttgtattcgcgagcacacaagaagatacagatatgttggctgaagaacttgcagaagcaggtcactcagttgttgcacttcacggtgcaatgccgcaaacagttcgtaaccgtcgtttacgtagtatccgtgaaggccgtgcgaaaatcttagttgctactgacgttgctgcacgtggtcttgacgttccaacaatttcacacgttattaacttcggcttaccaatgaagcatgaagattatgtacaccgtattggtcgtacaggtcgtgctggtcgtacaggtcaagcgattactttagcgacttatcgtgaacgcggtaaaatccgtgcgcttgaagactacttagaagctcgtttaaatgtttctgaaattgaaggtttagagccatctccacctccagctcgtccacgtcgtgaaggtggtcgtggtggtaacggtggccgtgatggtcgtcgtttcgagggtgaaggtaacttcaaacgtcgtgaaggtggtcgtgatgatcgtccacgtcgtagcttcgatgataagcctcgtggtgagcgtcctgctttcggtggcgaagatcgtccacgtcgcgagttcaactcagatcgtccacgtcgtgaaggtggttttgaagaccgtccacgtcgtagcttcggtggtgaagatcgtccacgtcgcgagttcaactcagaccgtccacgtcgtgaaggtggttttgaagaccgtccaaaacgtagcttcggtggtgaagatcgtccgcgtcgcgagttcaactcagatcgtccacgccgtgaaggtggttttaacgataagcctcgttttgattcaaatgatgacaatcgtggtaaccgcgtagactataaaccacgtcgtgaaaacggtttcggtgaccgtccacaacgtagctttggtggtgaagatcgtccacgtcgtgaaggcggttttggtgatcgtccaaaacgtagctttggtggtgaagaacgtccacgtcgcgcagttcgcgaagaacactttaatcaagaatctcgtggtgagcgccgtcgtaaattcgaccgttaatctttaagagatttaaaaaaaggccagtttacatactggccttttttattttttagttttgttataaaataacaaagtgtgaaacagttcaatgtttattgtaataatgcgtaaaagtaagcgaaaagagtcgcctttggcgtggttgagtaaattcttatttcaacgtggtttgccatatctttttattgcacttgctttgtgcaatggaatctactttgcctatgctttattaactggccatttcgtagaccagtttcaagttctcgatcaataaatttcttttcaaaatctagctcatattcctatattagcttgttttgcttttgtcaaaattacaacaagattcccaaaattcagtgttatagtatgcgggcataaaagtgcaggaatgattgccattatgaataataaaactcctctctcgactcaatcactgattgaagtgaaaaacttgagttttaaccgaggggaacgcgtcatttatgacaatattagtttaaatatacgtcgaggccagatcacggccattatgggaccatctggtacaggtaaaacgactttattacgcttgattggtggacagcttgttcctgatcagggcgaagttttgcttgatggtaaagatattgctcaaatgtcacgtcaggaattatttgcagcacgtgcgcgtatgggaatgctgttccagagtggagctttatttaccgatatgtcggtttatgaaaacgtcgcttttccaattcgtgcgcatactaagctttctgaaaatctcattgcagaactggtcgctttaaaacttgaatcggtgggcttgcgtggaacagaacagcttatgcctactgaattatcaggtggtatgaaccgaagggtcgctttagctcgtgcaattgcgcttgatcccgatttaattatgtatgacgaaccttttgcggggcaagacccgattgtgaaaggtgttttaacacgtctcattcgttcattgcgagaagctttagatctaactacgattattgtttcgcatgatgttcctgaaaccctatctattgctgactacatttatgttgtagcggaagggaagattcaaggggaaggaacgccagaagaattacaagcttatgcttctccatttgtaaaacagttcttaaccggctcggcagaaggtccggttgaataccagtttagccaccaagcttatttagataacgaggttcgtccatgaatacgattgcctggttaggtagactcgttattgagcggattcgagggattggtgttgcggcactgatgctcttacagattattttttcattaccttcagcgggcggttttggacgttttgtctatcaaatgcatcgtgtaggggtaatgtctttacttattatcacggtatcaggcttatttattggtctggtactcggattgcaaggctactcaatattagtcaatgttggtagtgaatcaatgctaggcacaatggtgtctttaactttactgcgtgagcttgcaccggttgttgcagctttgctcttcgctggacgagcaggttctgcattgactgctgaaattggttcgatgaaacaaagtgaacagcttgccagtatggaaatgattggtgttgatcctttaaagcaaatcgtatcaccacgtctttgggctggtatagtcagtttgccaatgttaaccgttatttttgctgcgattggtattgttggcggtaaattggttggagttgactttcttggcgttgatgaaggctccttttggagtggtatgcaaaataatgttcaatttggccacgatgtcgtaaatggcattattaagagcattgtatttgctttgctgtgtacatggattgctgttttccaagggtatgcatgtgagccgacacctgaaggcattgcaacggcaatgacccgcacggttgtatattcttcattatgtgttttaggttttgatttcgtgttgactgcggtcatgttcggagggatttaatgaaatcacgtactagtgagctggccgtaggtatctttgtcattatcttcggtattgctttattctttttagcaatgaaagtgagtggtctagtgggcacgaacttgagcgatggctacaccatgaaagctcagtttgataacgttaatggtttaaagcctcgtgctaaagtgacgatgagcggtgtaacaattggccgcgttgattcaatcacgcttgatccggttacacgtttggctacggttacttttgatcttgatggaaaactgacaagctttaatgctgaacagttaaaagaagttcaaaaaaatgctttagacgaattacgttatagttctgattatacacaagcgactccagcgcaacaaaaaacaatggaacagcaactgatcagtaacatgaactccatcacaagtattgatgaagatgcttatataatggttgcaaccaatggtttattgggtgagaaatatttaaaaatcgtaccgggtggtggtctaaactaccttaaacgtggcgatactatttctaatacccaaggaacgatggatctagaagatcttattagtaaatttattactggtggtggcgcaggtaaggttgccgctggttcatcctcagcagaagaaaaagctcctgcaagtactgacagcagtgcacagccgtcatttgttgagtaagagattatttgaaggagtggttccaggtgaatacgttgtttaaacaaacccttacagcaagtattttgtctactatgattgctggtacagcttttgctgcaccttcagaagcaccacctgactttattaagcgtgttgctgatggcttgatttctcgtttaaaagccgatcatgctaaattgcaaaataacccagcattagtaaaaacaattgtacgccaaaacttagacccgtatgttgattcacaagcgtttactcgtattgtgatgggtacttatgcaacaaaccaatatagtactgctgcacagcgtgctcagtttgaaacgaacttccgtaatacattaattgagaattacggtagtgcatttgctaagtatacaaaccaaacttacacgatgcgtccatacaaggcgacagctggtaaaaaccctgttgtgactttagattttaatcacaatggtgaaaaaattcctgtgtcgttccagttggcagacaaaggttcacaatggaaaatccgtaacatcaatgtttctggtattgatttaggattgcagttccgtaaccagtttgctgcaactgtgaaacgtaatggcggtgatttgaataaagcaattgctacgttccaacctgatgcagatgctgctgttaatcagaataaacaaaaataagtaggtgaagagtggttcagtatcttaaccaagagttagttgtttcaggcaaaattgattttgaaaatgctgaacaacaataccaagctggattggcaattattaaaaagcaaacaagctttcctttaattgttgatttaaagcagcttgagcatggtaatacgttagccttggctgttttagtgcaatggctacgtcaaactccacaaaagtctggattacattttaaaaatgtaccggagaagatgctgaaaatcattcaagcctgccatttgcaagaagacctacatttggtttgatgagcaaagataaaaaagcacctaaatttaggtgcttttttatatacaaaatttgcgggggtaatctctttaaatccattttttccagcggaaataaatgataggtccaataaagaaaccaataataattaataaaacgataataaagctggttgtaccgtgtgcgaaaggaagtacatcagtgttcataccatagatactggcgattaacataggtggtgccaacatacttggtaatatcgagaatcgacggatcgtatcgttttgttcagtgttaataaatcctgacgttgtatcaagcaagaatcgtactttttggaataagaaagcgtcatgttcgacaagcgagcgaacatcttcactaagttctcgaatatctgcatcgtagatatgactgcctaaagcacgtggacgagacaaaaacgttaaaacacggcgcaaatcaattaaacagagctgtgcttttccaagcatgtcttcttgttgtgccaagcgggtaatcatgtcatcaagatctaaaatctgttcacgttgatggttattgagaacctcggttgagtatttttctagatccttgtggatatcttccaagatatccgcaagctcatctagctttgcttcaagtaagcccaataaaatccatgttggatctttataatccatttcgtagtcattacgacgagctcgagcacgaaaagcacgaaaggcaactaacttttcaccacgtaaagtaaataagcgatctttatgtaagatgaatgcaacagtctgcaccatggcaagcatatgggaagaatcttcggcatccccatcaacctgataatttttatttttcgttaaaaaataggtgctgatatgcaaaataccgtcatcatcacggtagaatcgagcagaagatgaaatgtcttctaacgactttagtgtaggtaagttctgattgtaagcatctaagacccattgttgttcttcttgagagggtgcaataagatcaagccatactaattcgggatgtagatcaaatccaccattgatggtggcatcttccagacttccgcgttctgtggcataaaaggcttcaagcatgtgtcttttttccttacgcagtctgatggaaattgatgggtgtattttagacaaggatttgccgaaaaacacttgccaatacgctattttgcaaaaaaaaactctgtcgatagtctagtttgtcagcatgacagttcaataaaacggtttttatactatgaattcaatttgtattttctgtggttcatctcttggttcaaacccaatctttcaacaaattgctcaattaaccggtgaagctattgctaaacaaggtaaaacactcgtttatggcggtggccgttctggtttaatgggtgttgttgctgatagtgctttgcaagccggcgggcaggtcattggggtaattcctcgtgctttagttgatcgcgagttagctcatcctggactgacaaaattatatgtcgtcgaaaatatgcatgagcgtaaaaccaaaatggcagatctgtcggacggttttattgctttaccaggtggggcaggtacattggaagaaatctttgaacaatggacatgggcacaattaggtattcatcaaaagccgtgtgcttttctaaatgtagctggcttttatgaagatttgcttaaaatgattcagggaactgtagataacggatttagccaagcgcggtttgttgataaattgattgcctcagacaaaattgaagatattcttcaacaatttgagcaatatcaggctcctgctccgaaatggacaaatgccgacgttcaaccataaatgaggttaaataggtgaaaacaattacggtcgccgctgcggtgatcttaaatgaacaaaatgaattattgcttgtcagaaagcgtaatacacaagcttttatgcaggtaggcggtaaactggagccgaatgaggctccggaaagtgctatacagcgtgaaatcttggaagaaataggcagcccgtgtgtaatagaacagtttatagggcgttttgagacagcagctgccaatgaaccggatcacaagcttattagccatttatatttggttcgattaaaacaatccccacaaattgcagctgaaattgctgaaatgaagtgggtgaaatttaatgattccgagacaaaactcgcaccattaaccaaagaaattgtaattccgtggtgtgagcagaacttatctataactctataattttaatatgatgtagatgaagcagcagctaggcaactggcatgaatagatgtacaccctagctgttttagcgcctgacttaaagcgtgaattgaacttcctgttgtgattacatcatcaataatcagtacacgacgataacgccgtttttcttgagtgagcgcaacaaattgctgttcaatattttcaaatctttcgagtcgagataatcccttttgagaatgctcatttaagcgttgtacaggctgccaaactggtatttttaattgcttactcaaaagattggcgagtaataaggattgattaaaaccacgttcagttaaacgttgtttagaaataggcatgggtacaatcgcttgtaccttaggaaattttaattgctgtaaaacttcagcaagtaaggtttggtaatgtaatttttgttcatatttaaactgctgaatgatccggttaattggataggcgtagtgacaggccacaagaacagactgatcattgcgctgaatggtttgcttaagccacggtagctgttcccagcattctttacaaagagagtatttttcccgtgttcctatttcgcaaagtaggcaaggggacagcaactgaaaaagatactgtgggtttaaaaacttaaacatatgcgtatcgaggagcttcaggaagccagcgcttcaataaggcatcagcttgctcagggtaatcttttagaacttgttgtgcaacgtagtgtgcttgactcaataaatgatcatctcgctctaaacgtgcgacacggaaacccatatcacctgtttgttttgttcctaataactcacccgggcctcttagctcaagatctttttcagcaataacaaagccatcattactttctcttaaaattgaaagtctttcttgcccattttgtgaaagtggtggtttatagagaagaacgcaaaaactggcttttgcacctcgtcctacacgccctcgtaattggtgtagctgtgaaagccctaatcgttcagcattttcaatgaccataattgacgcattgggtacatctactccaacctcaataacagttgtggcaattagcagttgtagttcattgtttttaaatgcttgcatgacagcctgtttttcatcggctttcattttgccatgaaccaaaccaatattaagttcaggaaagcgctctttcatttcttgataggtggcttcggcggcttgagcatctaaagtttcggactgttcaaccagagtacatacccagtaggcctgtttgccttctcggcagtttgaagcaattcgatgcagtacttcttcacgacgatctagcggaatcgtgacggtctgaattggagttcgacctggcggtaattcatcaataattgatgtatctaaatcgccataagcactcattgccagtgttctaggaattggcgttgcagtcatgaccagttgatgtggggtgagctgttcggcgcctttattacgtaaggctaatcgttgatcgaccccgaatcggtgctgctcatcaataatcacgagtcctagttttgcaaactcaacgttatcttgaaataaggcatgagtacccacaatcagttcagcatggccttctttaatttgttgctcagcgtgtgcccgcgctttccctttttgtttacccgacaaccaagctaccgtaatacctaaaggttcaaaccagcgtttaaaatttaaataatgctgctctgctaaaatttcggtgggtgccattaaagccacttgccaatctgcttctaatgcgtgacatgctgcaaccgctgcaactaaagtttttccagcccctacatcaccttgtaccaaacgcagcataggttgatgttgttttaagtcgtttaaaatttcttttgatacacgtttttgtgcgttggtcatttgaaaaggtaaagcttctagcagcttttttgcaagcactttactactcggaaaagcaggtgaagcaatttgacgaatataagcacgtcgagtgagaagactaatttgatgtgcgaccagctcttcaaaaataagacgttgctgcgcaggatgagagccttgagccaattggatcatattggcatcaactggtggctcatgaatgtaatgtaaagcttctttgagtgcatacccatttgtatattgtttagggagtaactcgggtaaagcatcactatgatgcttcaacgcttgtttaacatattcgcgtaatttagcttgtgttagtccatcggtacttggataaattgctgtgagctgcgtttttggaaggggagtatgttcattaataagttgaatttctggatgataaagctcaagccctcgtgcacctacgcgaacttcaccaaaaatacgtaaacggttaccaggttttattttgtcggttaaatttttataaatatgataaaagcgtaaagtcaccttaccaaattcatcttgtattaatgcggccatagatttacgtttacctggagggaaatcaacagatttgacttcaccctcgagtaaataactacgaccaaccaccaattgattcataggaataatggtactgcgatcttcataatcacggggcagatgaaacagcaaatcatctgtggtaaaaatatttagtttttcgagtagggctgctgaagccgatccaacgccttgtaactgatggactgaagtcatgtcccctcaacgagttctctatgcatatattatttatcggttatggtaaaacatctcagcgtgttgctaaacaactatttgagaaaggacatcaaattaccacaattagccgtagtgaaaagacagacccttatgggacacatctcgtacaggatatttttacgctcgatttaagcgaaattgcacctgtagatgtagtgtatattttactttcaccagacgatagtactgttgaaggttatcagcatacttatgtggatagtattgagcctattcgtcaggctttaaaatcgcatccggttaaaagattaattgtggtgtcatctacgcgggtatatggtgaaaattctggtgaaacaattgatgatcatagtgagattcacccaaacgatgcccaagggcatatcttgcacaatatggaattgctatggcaaaagtattttccgtcacagtgcgtgattgtacgtcctacagggatttatggggcttctattgatcgcctaaaacgaatggctgagcacacgcaaacctatccaaatattcactatagtaaccgtattcatattgatgatttagcaaggtttttggcatttttagctgattttgaaaaaccccataaaagttatcttgttgctaataatgcacctgtacctttgcatgaagtcttactgtggtttcaaagtcagttagatttaccgctacttaccttagattcagctcatgtgtcaggcaaaaaaatttatgcgaaacatttgtttgagacgggttttcaacttgagcatccaatttgctttaatgactatttattatgtttaaatgctcatggtacaaattaaaatttagactaaactttaaataacaacagaaatacctgatgaggcagttaaattgccgataaagataaaaaggttaaaagtgaaaaaattttgtttagctctctttttgagtgtaacgtcagttacgagttgggctggggatcaggtgtggtgtgcatatgatccagcgggtacccaaggggatattacgcgtcgactaaatgacattcgtttatatgctcagcaatatcaggttaaattcaaagtcgttagttatcaaaaagagcagcaagccattcaagcctttgatgagggtaaatgctcaggcttagcagccagtaactttaatacttatcagtataatcattttatgggtagtacctcaggtattggtcttatacccaataaccggactgcacgaaatctattgcagcttttaaatcatcctacaattgagaaaagattaattaataaagactatgaagcagttggtatgattccggttggaactgcaaatatggtcatgaaaaccaaaaaaatatcaaaagtggcacagcttagaggtcaaagaattggagttctggccaataacccgccacaacaagctttggtgagaagtgtaggtgcgcagccagtatatgttgatttatcgaatgcgattgcgcagtttcgacaaaataaaatcgatattatgccagcgcctgtttatggtcttttgccttataacctacagaaagattttgggccagatactcaggtgattaattttcctttggcgtatttcggggtaaatataattattaaaccacaagcttatccagccaattttggacggaaaattcgggcttggtttgtccaaaatagtcaattattaacgaatcgagctatacaatgggaaaaccatttaccagcctattattgggttgacgtttctttttacgaaaagcagagctatgacattatggtggcaaaaatacgcaatcaatatgttcgctccggttattacgatgcctactttgtggagctaatgaaacgcttacgttgtattgatgatccgcgttactttgaatgtccaatgagtagataaaataaaaggcaacttaagttgccttttattttgcatgaagactttaagcttttttacgttttaaacggcgtttggcttgctgagaagccattgcttcaagagcttcttttaactcttcatcagtaaaggttgtgatgtgttgcaacatttgtaatgttacttcatcaagcaccaactgtgcgcctgctgccatctgacggaaattatcatcaaactcaatttggccttggtcattcgttcgaatgtagttttgttgagttaaaactttgataaagctttggaacaatgctttgtcaaagaattcaggagagttaaattcataaagaactgataaacgttggcctaataaatgacttaattcttcaacttgttttgctgaaatattgcctgaaccacgctgagtgattaaagctaaagtcatgtaataacgttcaaggctttgtttaacaggtgttgctaatacaacaagctgattatgctcttcagtatttggtgcagagctaattaaattgccttcgtcatcttgttgaataagatttgattgaaccaatgcatctgcatattgctcaatctgttctttaagttcgctacttttccatttaaggaatagttcggcttttaagaatggataaagtgtatagataacattgcttaaatcagcacggctaattttcccgttatgttcaacaagagatgcaatcaatgaaggtaaaacgaatgcatgcaaaatgttattgcggaaataggtgaggagaaccgcttggttatcttcaatcgcaataatgtcaccaagggcatgctgtacgcgcttaatcaatttaagctttaagccataagcaataatttccttaccagatagcggcgtcacttctgtgcgctgatcgtaagggaaatttgatgctaaattgcggtaagcttcaagctgcttaatacagatttcttcatcaagtgtatgctttggtgttgcaagcaagataattgaaagtaaagaaaccggattaatcactaccgcacggttaatattttctaaaatcgcatttgcagaactgtttactgcctctgaaacagcaggtggcactgggtcatcgttcttttcaatataaacgttctcagcattatgctgtttaagcaagtcatctagaaaaacaggttcaccaaagttaacgtgtactttaccgaaaatacgttcaatttttcggagtgtttttaaaataccaaaaatagactcggcttcttttggcttaccttgcatttcgcctacataggttgaaccttccataagacgctcataaccaatgtaagttggcacaaatacaatcggcttggcacggccacgtaaatgactatggactgtcattgcgagcatgccggttttcggtggtaataagcggcctgtgcgcgaacgtccaccttcaataaagtattcaagtggtgtgttgcgagaaagaatactatataaatattctttaaatacagaagtatagagaccattaccacggaaagagcggcgaataaagaaggcaccgccaccacgtaaaagctgaccaacgaaaggtaagtttaggttgtcgcccgcagcaatatacggaaccatcaagccacgtttataaatcacataagacagtagtaagtagtcaatgtggctacggtgacatggtgtgtaaacaatttcatagtcttttgcaagctctcggacagtactgaagttatgaacttctacgccgtcataaagctgagtccatagacgtgttaacgccaaatctgcaaaacgtactgctgagtgagaataatcagatacgatttcattcacataaccaatcgcacgacgctctgcttcaagcatgctgattttaccgcgaatactttcgcgtcgaatggcttcttgaacatcacgagactttaataccgactgcatgacattgcggcggtcagataagtcagggcctaaaacaacttcgcgttggcgatcaaggtagtcatttaaagtgctaacaatataagttgctggtgaaaggtttggataatgcttctgagcatattcaacgaggtcacgtaaagactgtggttcatggaattccaaataagattggcgaccatgcaaaccaatattcacaagctgtttaactgtacttggtgttgcccatgtatctgagaataacaacttaaaccaagagtcttctttatctggagaacgaccccataaaacggttaccggaaccagttctatgtcgagttcaggatttgcttgtaaaacttcgattagtttaattaaacgtggcggaaaagcatgaggagggggattcagtaggttattttcatcattgtgttgtaaaaataaaactgaagctttttcctgatgagtaccgatgactaatggatctagcgctggctttaaatttaagcggcgagtttccccatccaccactaaagcattactgcgagaatgattttgcaagacatagcacactactttttggcgctcggtcttcgcttctgtttctgttgttgatactggttcagtaggaacttccccaagaacatgtggtgttaccacgaggtcaagtagtttactcgaaagccgacgatacatttgaccaaacccactcttggacataagaactcctacttcttaaagacaaatcccggcaccaaaggcagagggtaaatattttgcggtatttattaaaaaaacaatatgctattttctgataaattataattcttttggcattttttatcgttaaaaatcgtatttttagctgttttaaaggcaatgtttgtcagaagttgactgattgttccatgtacaaatagttttttatggcacaatagattctacacatctgtcctttaataccaattttgcctgcaatatgaaggtatctctcatgaatgcgttaacccaagaactggttgagctgctcactttagaaaagcttgaagaaaatatttaccgtggaattagccgtaatttggtcggtaaacgtgtttttggaggtcaggttctcggtcaagcattacgtgctgcttcttacacaactgatcgtcctgcgcattctctgcatgcctactttttatatggtggtgatattaatgctccaatcatctatgaagtagaccgtttgcgtgatggcaaaagctttgtcagccgtcaagttcgggcaattcagcatggacgagttattttctcggcaatggtgtcttttgctaaccctgaagaaggcttgaactatcagcatccagaaccagattacccagctcctgaagcgctaaaatcggaaagtgagctgaaagaaggtatcctgaattttgtaccggaaaatgttcgtgcaagttttatgcgtgagcgtcatgttgaaatccgtccgattgatccagtcaatccatttcaaccacaaccggaagcgccttttaatgcgcactatatccgtacccatgaccgtattccaaaacagctagatgatatttcattgcatcaagcaattgtagcgttttactcagactttactttgatgacaacagctttaagaccacatggcttaagttatatttctccaagtttgcaatgtgccagtattgatcatgcgatttatttccatcgcccacttcgtgctgatgaatggatgctctatgacatggaagctacagttagtgcggcttctcgtggtttaaactttggccgtatgtggcaaaatggccaactcgtatgtagtacggtgcaagagggtttgatgcgtttacgggaaattgaaactcaataaataacgatgagccatctgaaaagatggcttttttatttttaattgaaacgatgtgacaaaaaattgctcgaatgaaaagcaagctcatgtcatatttacaaaaggattgcctactgaaaaaaataatgttgatatgaacttaaatacacaaattctgattgctgccattttaggtttagcctttggcttcctacttaccatgtatccggacactgcttttgtaaagcacagtttatatggattaggcatattaagtagtgtttttattgggctacttaaaatgttgttggtgccattaatttttagctccattgtggttggagtttcaaatttgcaggcaggtggacaattaggcccagtttggaaaatcacattcttgtgttgtatcaccaccaccaccttggccttaattttaggtattagctgtgctcatttgtttgaggtcgggcgaggtgtagatatttcaatttttcaggcatctatgcaaagctatcaaacaccagatagtttaaacccggcaactttcttcactaattttattcaaaatactttaattaacccatttaaagcttttagtgacggaaatgttttagctgtcgtcgtgtttgctctatttgtgggtgttgctttagttcatggtggcgaacgttttaaaagtattcgggtattgagtcatcagttttttgaaatgatgatgatgctagtaggctgggtaatgaaattggcgccgttaggtatttttgccttactcgctaaattaatggctaccgaagacatttcagtattaagccgattggcggagtttgctgctgtggtaacaggtactactatttttcatggcgctgttgttttaccgctactgctttggatttttggtcgtatgagcccttggactttcttcaaaggcacacgtacagctttaattaccgcatttgcaacgagctctagctctgccactatgccgctgagtatgaaatgcgcacaggaaaacttaggtgttcgtcctcaaactgcaggttttgtgattccattgggtacacagctcaacatggatggtacagctttatatgaagctgctgccgcgctctttgtggcaaatctagttggactagacttaaacctgacacaacaaattgtagtgtgcctaaccgcaatgatcgcatcacttggagcaccaggaattccaagtgcgggtatggttaccatgattatggtattacagtctgtgggtttacctgccgaagcaattgcgattttacttccaatcgatcgtttactcgatacggtaagaacggttgtaaatgtgcagggagatatgatgattagtgtggtagtagatcgatataccaaagataaagatatcagtatctaatctctaaataaaaaagcaggatttatatcctgcttttttattttaagctgcttgtaattcagctcttttggctgctggcgactgcgataaataacttaccgcatcttcagtgctaccttctttaactggatcataccacggcatgagatagtcaatttgctgagcaataagccagattgggtttggtaaaacctgattatcttttcggctaattttataccattctagagcaacccaagctgggaaaaatcttgatttggcagcatcagcaaaacgtggatcttgcttcataatatgtgcagcgccgtctacccatagtcctaacacaagcacaattactgcaagacttaaataatagcgcggcatataaccgcctcctaaatggcgatataaatcgaaagcaaccgtgcggtgttcaatttcttctgaaccatgccattttaccaagtctaccatttctggatctgcgcctaactcttcccagcgtttgttataaagcgcatatttacctaggacacatgtcatgtgctcaactgtcgcgataacacctaaacggaataaatcccattgctcttgcaagaattgcggaacttctttgtcaaaaggcttatctgccaaagcagtagtaaatagataattcataatgtccagatttctctggatatcaatattgcgtgcacttaaatattctttattggcagaagtgtgtgcgtttgcatgcattgcttcttggcgaataaatgcttgtacatcctgtttaagtttttcatcagtaatacgaggtaaaaccttgttatagagccggcaaaaccagaactctccagcaggcaagatattgttaatttcattaataaaataacttgcaaacggttggtttggaatccagtctacaggggtatctttccagtcaaattttaccttgcgtggaagaattttataatcaatagaagaacctaaagccttattcttcaaaaaagatagcaatttcatcatttagtcctgatttttaactcgatgaagttatgatgagtataaaaaaagcccctacatttgtgtttagcaataggggccaattgaatataaatttaatgaagaaattgtatctgttttgacgatttactcttctgcatcctcatcgctcgcttctgggattgtatcaacgtcaaattctggctgttgttcaagcgtaaagtgcagacgtccagccatcacacttgctagctcttctaaacctagtttgtttaatgaagaaaaaagctgaatcgagaaatcaagcttcatttttttcagttgttgtttaacttcaagcaatactttgttcgctggaccgcggttcagtttgtctgctttggttaaaagaatatgaacaaataaatggcgtgaataagcccactctagcatcatcatgtcaaagtgctgtaaagggtggcgaatatccatgagtaaaaccaaaccttgtaagcttttacgatggattagatagttttctaattctttttgccatacacgtttcatatcttccggtacggctgcataaccataaccaggaaggtcaactaagcgttgatctgggttacctaggctgaaaaagttaatcatttgcgtgcgcccaggttttttggaggcacgtgcaagctgtttctggtttgttaatgcattaattgcgctagattttcctgcatttgaacgtccggcaaacgcaatctcgtagccactatcttcaacacatagtgccaatttcggagcactcattaaaaattcagcttggcgtaaccagtttagagattgcacagcataggctgtaatcgctggatccggtttcttttcataactgatcttttgcttgggtgcgagtctggctttggtgtctttcgatttttcactacgacgcataaaaaataactttttaaatgagagggctcgcgcctagtataaaggagcttggttattcttgctaattttcagtaagcttgcttaaaaagataaatagaattacgggctctagagttgtaaaaaggcgataggggagtgatctgaagcagattttggctgttgtaaaacttcacccaacgtatattgatctaaactttgataaaagctttccaaagcttgatcaagaatacctttcaaaccgcaatgggagcgtaaaacacaaggtggtgtattgcattcaacaatttggtggtcaccttgtaaaattcggacaattgttccaagttttaaatctaaagcttttggatttaatcgaattccaccacctttgccgcgaatggtaataatccactcttgtttacccataaaatggacaaccttcacaagatgattttgcgaaacatataaatcttgagcgatttctgcaatcgtgtacggcgcatcacttggacgagcgacatacattaatattcgcaaagcataatcggtaaatttattaagttgcatgatcaccaaaaactaaaggttaggaggttgatcatcttagcctgaaagtctaaagaataaaactttcaggctagagctttttaagttacagcgttaaaggagctgaaacttgtacttgatcaccaactctatagtgctcaagcaaaatgtttgaaacagagaactctgtatggtcttcttctggttgaacatcaaaatgataagtattgtcctcttgagcctctgtgaacttaaatgcttttggttgttcaagctgttggttaggtacttgaacttttacagaaataaaagcatttgctgggctggtgagtacatcttcatgatcagttgcctttaaagtaaagcgtttgccagactcaagtgggtcaatttgcgtaatttcaaatgaacgccagccagcccatccacctttcaagctttcaagttgttcatatttttgtttttcaacaccaattaagatatctgccaactgtaagtaagcttgtttccacgcttcaatgagttctgattcaaatggaacatttaaaacttcactaattgaatgaagcaagttgtcgcccacaattgcatattgatctggctgaatatctaaactgacatgcttagtggtaatgcgttcaaccgctttggcaagcaccgtaggattctcaatattttcagcatacgcgagtacagctgctgcaagagcacgaggttggcgcaggctggtctgatcatcaagattaaaaacattttttaattctgggttgttattcaacatacgcttatagaagtatgtagttagagtaacaccatgttcacgcaatacaggtacagtagatttaacgagttcaatttgttgtggagtcatggctagaccttaattatctggctatataagatgtatttaaaatacatctttaaaatagttgtagcaatagctttttaataaaaaccttaaaaaatttaagggatataaaatcccttaaattaatatactgatttaaaaataaattttattttccaaataatgagccgagtagtccccgtactaatttttggccagtactaccacctaagctgcgagcggcactttttgcaaaagttccgacaatatcttgagtaagtttagctctttcacgcgccgcacgttcctcttctttttgctgttcacgtgctagacgctcttgttctttggcttgttgtttcgctaaggtttcctgttctttcgcttgctgttttgcgagttctgcatcttgtttttgctgttcccgttcagccactttgttttggagcatttcataggcactatcacgatctacagcttgttcataaaccccggcaataatactttgcgaaattaaggtctgacgctcttctggagtgataggcgtaaatgaagagtaaggaggcataacccaaccacgttctacaatttgaggtgtaccttgttcatctagacaactaatcagtgcttcacctacaccgagctcggtaattgcttcatctactttaaaatcgggattagagcggaatgtgtctgctgctgtttttactgctttttgatctttaggagtaaaggcacgtaaagcgtgttgtacacggttgccgagttgccctaaaacactttctggtaagtcgagcgggttttgggtaataaaataaattcccacacctttagaacgaattaaacgtacaacttgttcaattttttcttgtaaagcttgactggcgttgtcgaataacaggtgagcttcatcaaagaaaaacacgagtttaggtttatccatatcaccaacttctggaagctgttcaaataattctgaaagcatccataacaggaaagtagcatatagcttaggtgtattcatgagcttgtcagccgcaagaatattgatataaccatgcccatttgcgtcggtttgtataaagtccagaatatttaaagctggctctccaaaaaactgctctccaccttggtcggcaagagcaagaagattgcgttgaatagcgcctaagctggctggagataagttgccatattcggctttaaactcagctgcatgttcacttacaaaagtgatcatggcttttaaatctttaaagtcgaccagaagtaacccttggtcgtctgcgatacggaatacggcagataaaacaccttcttgggtgtcatttaagttgagtatacgtgctaataaaattggcccaatttcagaaatagtggttcgaatagggtggccttgctggccaaataaatcccagaaaacaactggattggctgcaaatggaacactgtcgatctgtaaaagctttaagcgttcattaaatttatccgaagcttcaccagcttttgcgagactcgaaacatcaccttttgcgtcggcaagaaagacgggaacgccgattcgagaaaaactctctgcgagcacctttagggtgactgttttacctgtaccggtcgcacctgcaatcaggccgtgccggttggcaaattgggaaagtaaaacaatttcttttgatgtgtcgttaatattttttgcaataacaatcggtgtacccatatatttttatcccttagtgtgagccactattgatgttgtcgttttacatttgtttcaaagcattttcgatatcttgaattaaatcttgtggatcttctagccctatacagaagcgaaccaacaaaccttgttgtaaatgtgtattttcaagttttctcatcatttttaaatcataaagcatgacgagactcacaggtcctccccaactaaaaccaattttgaatagcttaagagcatcacaaaaacggcgtactgctgaaatatcataatcagatttgaatacaacactcactaagcctgcacttttacctgttgagcaaatttcttgccagtattgatgaccaggtgcagctttatcacttggatgtagaacttgtgcaaactgaggttgctcttttaaccatgtcagtagggttttagcattatttgattgttgctcataccttaatgacatatgcgcaagactgcgttgaatttgggcggtatcatcaccagataccgaaatccctaaaatggcatgcattcggaacaaacggtgatgtaacttctcatcacgagttaccacacttcccattaaaatatcgccaccaccacttggatatttggtaagcgcatgaatggttaaatccactgataaatgctcatcggaaaaatcaaaagcattaaaggcgaggccagctccccaagtattatctagtgcagttaaaacgccatgtgcttttgctttttttactagcgctttgagatctggaaattcaagagtgacagaacctgctgcttctaaccatagcaacttggttttatcagaaggctggaaacttgagacatcgatcgggttataaacttgaacattaattccatattgatcttttaagtagtttaggtgttccagattcggaccatatatgttgtctggcacccaaacttcatcacctgttgctagcacagcagaatttacgagattaatcgcagataacccgcttggagcaagtaggcagtataaaccaccctcaacttgagcaatattatcgcctagtgtgaatgtcgtaggcgtaccgtgggtgccataactatagtcataaggatcggtccaatgacggtcaaaaaggtgcgaagttgatttaaaaataatagttgatgcacgaaataagggaggttgcacggtttcaataaattgaggtgcttttcgtggtgcatgaatgagttgggtttggaaattgttatgctttttcatggggcgctatactttacataatgagattagattaagagaaaacttacttaactgctagatttttgattatttctaagatgtttcgttactagtgtaacattcattaaaacttggctttatttttgcaaagatcaaaccaacattctaacaacaataggtttaagcgcatgaagtcgcatttacgtgttcactattttcaacatattgctggcgaaggttttggaagctgctattcattcttaaaagcacaccatgcaacgataacagctacagagttttttgcacttccagttgatctccctttggaaatagaagcattgccacatattgaagatgtggatttgctacttattatggggggaactatgagtgtaaatgatgaggcaaattatccatggttaaaaatagaaaaaagatggatacgtcgttatttggcggcgggaaagcctgcgataggactttgtctcggaggccaacttattgccaatgcactaggagccgccgttagtagaaaccgttatcaagaattgggatggtcgaccgtacaaagggtgccgaatttacctaaagaaagctttttattaccagaaaaaataaatgtaatgcagtggcatagtgaaacttttgagattcctaaaggtgcgattcatttagcagagaactcagtttgtcgtaaccagatgtaccaaattggttcaaatgttcttggttttcaatttcatccagaaatgacaccgaaggtattaaatcttcttttagagaacgaacaagagctttctatttttaaaggtgagtatgttcaatctttagatgaactacatcattgcgacatccaaaagtttgaacaaggcaatcaacttttaaacagggcaatagagttcgtggtcaatcaataaaaatatagagttgatgagaaaaaggatgaattgagcagaaaatagaaaaagagaattgcataagacttaaacaatcgttataataagcgaccctcaagaagagggcatttactgcgaagaaagtagtaaatgtgcattacagtcgtggcatcgatcacgaccttggtgattatcactgcctttgacacttaccagataggtgagatgcgtcaaaggtgattctttatatatttggcttggagtttactggtatgtctaaccagagaattcgtatccgtcttaagtcttttgatcatcgtctgattgatcaatctgctcaagagatcgtagaaaccgctaagcgtaccggcgcacaagtgtgtggtccaattccgatgcctactcgcatcgaacgcttcaacgttcttacttcaccgcacgttaacaaagatgcgcgtgaccagtacgaaatccgcacctacaaacgtttgatcgacatcgttcaacctacagataaaactgttgatgcattgatgaagttagatcttgcagctggtgttgatgttcagatcgctttgggttaaggctttcggttaattaacgattagttaattaggccgcttttttagaggtttatgcacatggctattggtttagtcggtcgcaaatgtggtatgactcgcatctttacagatgctggtgtttctgtacctgttacagtcatcgaagtcgatccaaaccgcattacgcaaatcaaaacacttgaaactgatggttatcaagctgttcaagtaactactggtgaacgtcgcgagtctcgcgtaactaacgctcaaaaaggtcacttcgctaaagcgggtgttgctgctggtcgtttagttaaagagtttcgtgttactgaagctgagcttgaaggccgtgaagttggcggtactattggcgttgatttgttcacagttggtcaaattgttgacgtaactggtcaatcaaaaggtaaaggtttccaaggtggtgttaaacgttggaatttccgtacccaagatgctactcacggtaactctgtttctcaccgtgttttaggttctacaggtcaaaaccaaactcctggacgcgtgttcaaaggcaaaaaaatggctggtcacttaggtgatgaacgcgtaacagtacaaggtcttgaaatcgtatctgttgacactgaacgttcagttttggttgttaagggtgcaattcctggtgcaactggcggtgacgttatcgtacgtcctaccatcaaggcctgaggggaaataccgtgaatttaaaaactgtttccggctctgctgttgaattgtctgaagtagctttcggacgtgaatttaacgaagctcttgtacaccaagttgttactgcttacttagcaggtggtcgtcaaggtactcgtgctcacaaatcacgtgcagacgtttctggcggtggtaaaaaaccattccgtcaaaaaggtactggtcgcgctcgtgcgggttctattcgtagcccaatctgggttggtggtggtaaaacttttgctgctcgtccacaagattggtctcaaaaagtaaaccgtaaaatgtatcgcggtgcaatgcaatgtatcttagctgaacttgttcgccaagatcgccttgttttagttgaagagttcgctgttgctgctccaaaaactaaagaattgcttgcaaaacttaacgatttaaatgcagctcgtgctttgatcgttacagatgctgtagatgagaacttatatcttgcagcgcgcaaccttccacacgttgatgtggtagatgcaactgcaatcgatcctgtaagcttgatcgcgtttgataaagttgtgatgtctgtagctgctgctaagaaaattgaggtagaactcggatgaacaacgaacgtatctatcaagtcctaaaaggaccagtcttctcagaaaaggcacaagttttaggtgatactgctggtgttcaagtatttaaagtagatatcaacgctactaaacttgaaatcaaaaaagcagttgaaaaactttttggtgtagaagttgttaaagttaacacaactattactaaaggtaagactaagcgctttggtcgtacattaggacgtcgttctgatgttaaaaaagcatacgtcaccctgaaagccggccaagatgttgaaatggctgacttgggcgataccgctgaaagcgcagcggaataaggacgaaaattatgccgattcaaaaatgtaagccaacgtctccaggacgtcgctttgtagagaaagtggttcatgaccatcttcacaaaggcgcgccttatgcaccgttggtagaagcaaaaaaacgtactggtggtcgtaataacaacggtcacattactactcgtcacgttggtggtggtcataagcaacattaccgtatcgttgactttaaacgtaacaaagatggcgtacctgctgttgtagaacgtattgaatacgatccaaaccgtacagcgcatattgcattattgaaatatgctgacggtgagcgtcgttatatcattgcgcctaaaggcttacgtgctggtgataaagtacaatctggtaacgatgctccaattcgtccaggtaactgtttaccacttcgtaacatgccaatcggttctacacttcataacgttgaacttaaaatcggtaaaggtgctcaattagcacgttctgctggtgcttcagttcaattgttgggtcgtgatggttcttacgcaatcattcgtcttcgttcaggcgaaatgcgtaaagtacacgttgaatgccgcgctgtaattggtgaagtttctaaccaagaaaacaaccttcgctcattaggtaaagctggtgctgcacgctggcgtggtgttcgtcctaccgtacgtggtatggcgatgaacccgattgatcacccacacggtggtggtgaagggcgtaacaaaggtattcaacctgtaagcccatggggtcaaaaagctaaagggtacaagacacgtaccaacaagcgtacgactaagatgattattcgcgaccgtcgcgtcaagtaaaggaatctgactaatgcctcgttctctgaaaaaaggcccattcgtcgatgcgcacttgttcgctaaggttgaagcggctgttgctagtaactctcgcaagccgatcaaaacttggtctcgtcgttcgatgatccttccagactttgttggtttaacaatttctgttcacaatggccgtaaccacgttccagtaattgttactgagcatatggttggtcataaactcggtgaattcgcgccaactcgtacctatcgtggtcacggtgttgacaagaagtctaaacgttaataggtgtcatgatggaagtaactgctaaattacgcggtgccgctatctcggcacaaaaagcacgtttggttgcggacttaatccgtggcaagtctgttgcacatgctttaaacatcttgaacttcagcaacaaaaaagctgcagttttagttaaaaaagcattggaatctgcaattgcaaacgctgaacacaataacagtttagatgttgacgaccttaaagtttctacgatttacgttgacgaaggcatgagccttaaacgtattatgccacgtgctaaaggccgtgcagatcgtattactaagcgtacttgtcacatcaccgttaaggtaggggtttgatatgggtcagaaggttcatccaatcggtatccgcctaggtgttgtgaaacgtcataacgctaactggtatgcgaatccgaaacaatacgctgaatacttgcttaaagatcttcaagttcgtgagtttttaactaaaaaacttaagaatgcgatggttagcaatattcttatcgaacgtccatcaggtgctgctaaagtaacaattagcacagctcgtcctggtatcgtaatcggtaaaaaaggcgaagacattgaaaaattacagcgcgaacttaccaacatcatgggtgttccagcgcaagtaagcatcaacgaaattgatcgcccagacttggacgcgcgtttagttgctgaagcaatcgcttctcaattagaaaaacgtgtaatgttccgtcgtgctatgaagcgtgcggttcaaaacactatgcgtgctggtgctaaaggtatcaaagttgaagtttctggccgtttaggtggtgcagagatcgctcgtacagaatggtatcgtgaaggtcgtgtacctttgcacactcttcgtgcggacatcgactatgcaactatgcgtgctgaaactacttacggtacgattggtgttaaagtttggattttccgtggtgagattttaggtggcatgaaacaagtcatgaaccctgctcctgctgaagaacgtccagctaaacgcggtcgtggtcgtggtgaaggtcaagagcgtcgtggtcgtcgcggtgaccgtgctgctgacaagggagaataatccatgttgcaacctaaacgtaccaaattccgtaaagtgcacaaaggccgtaacactggtctagcacatcgtggtagtacagtatcatttggttcgattgcaattaaagcaactgagcgtggtcgtatgactgcacgtcagattgaagctgcacgtcgtaccattagccgtcgtattaaacgtggtggtaaaatcttcattcgcgtattcccggacaaaccaattaccgaaaaaccattagaagttcgtatgggtaacggtaaaggtaacgtggaatattgggtttgtgagatcaaaccaggtaagatcctgtacgaaattgaaggtgtgaacgaagacttggcacgtgaagcttttgctttagctgctgctaaacttccgtttaaaaccactatcgtgactcggacggtaatgtaatgaaaactaaagatctacgtgaaaaatcggtagaagagttgaaagctttgcttgatgagcaacagcttaaccaattccgtcttcgtatggcgaaagcaactggtcagttgggtaaatcgcacgaagtgcaagttgctcgtaagacaattgctcgtattaagacactccttaccgaaaaacaggggaacggacaatgagtgaaaaaacagtccgcacgttaaccggcaaagtagtaagcgacaaaatggacaaatctattgttgtccttatcgaacgccgcgttcaacacccgttgtatggcaaatcaattcgccgttcaactaagttacacgctcatgatgagaacaacgttgctaaaattggcgatgttgtaaccattaaagaaagccgcccaatttctaaaactaaagcttggactttagtggaagtagttgaagcagctgctgagtaattcgacgttcttgttgcatcatcggtcaatttcgagtactctttgagcctttcgaaattgtgaccggtgatgctcggttttggagtagggcaatgattcaaaccgaaactatgctcgacgtagcagacaacagtggtgctcgccgcgtacaatgtattaaagtacttggtggttcacatcgtcgttatgcttctgttggcgacattattaaagttactgtaaaagaagctattccacgcgcacgtgttaaaaaaggtgacgtgatgaatgcagttgtagttcgtactaagttcggcattcgtcgtccagatggttctgtgatccgttttgatgataacgctgcagttattttgaacaacaacaaagctccgattgcgactcgtatcttcggaccagtgactcgtgaacttcgtactgaacagttcatgaaaatcatttcattggctcctgaagttctataagaggcaatcatggctaagattaaaaaaggcgatcaggttatcgtgatcgcaggtaaagaaaaaggcaaacagggtactgttttgtctgtttctgaagaccgcgttaaggttgaaggccttaacttagtgaagaagcatcaaaagccgaatcgtgtaactggcgctgaaggcggtatcgttactcaagaagcttcgcttcatatctcaaacgtggcaattttaaatgctacaacccagaaggctgaccgtgttggttaccaagtgattgatggcgtgaaaactcgcgtttacaaatcaactggtgaatcagtggcggtagcgaagtaataggttgaaaaggcaatggccagacttaaagcacgttacaacgacgaacttaaagcgaagttacaagaagaacttagcattaagaatgtgatggaaattcctcgcatcacaaaaatcactcttaacatgggtgtaggcgcagcagctactgataagaaattattagacggcgctgtagctgacatgcaattaattgctggtcaaaaaccagtagttactcttgcacgtaaatctatcgctggtttcaaaatccgtgatggttggccaattggttgtaaagttactttacgtggcgaccaaatgtacgaattcttggaccgtttgatctctatcgcaatccctcgtatccgtgacttccgtggtttctcagcgaaatctttcgacggtcgtggtaactactcaatgggtttgaaagagcaaatcgttttccctgaaatcgatttcgacaagattgatcgtattcgtggtatggatattactattactacgactgctcgcaccgatgacgaaggccgtgcgcttatgcgtgcattcggcttcccgttcaaataagaggtcgatatggctaagaaaggtatgattaatcgcgaattgaaacgcgaaaaaactgttgctaaatacgctgcaaaacgtgctgaattaaaagctactattgcaaatgtaaatgcgagcgacgaagaacgtttcgaagcgatgttaaagttacaagcattgccacgtaatgcatctccggtacgtcttcgtaaccgttgtggtttaactggtcgtcctcatggttacttccgtaagttcggtttaagccgtaacaaattacgtgacacagtaatgcaaggtgatgtaccaggcgttgttaaggcaagctggtaaggagcgactaaatgagtatgcaagataccgttgccgacatgctaacacgtgttcgtaacgcacaaatggctaagaaacaaactgtttctatgccgtcttctaagttgaaagttgctattgcaaacgtacttcaacaagaaggttatatttcaaacgtagaagttgctcaagaagagacaaaatctactttgactattactttaaaatatttcgaaggcaagccagttatcgaaatggttaagcgcgtaagccgtccaggccttcgccaataccgtggtaaagataaacttccaagcgttaagcaaggtttaggtattgcaattgtttctacaagcaaaggcatcatgactgatcgcgctgcacgtgctgcgggcatcggtggtgaagttattgcttttgtttcttaataggtgattcctcatgtctcgtgtggctaaagccccagtaactgtaccaaatggtgtaacagttactcagaacggccggcaggtcgaagtgaaaggcagcaaaggtacattgtctttcaacctgcatgcgctggtcgagctaaaacaggaagaaggtaaacttcaacttgctccagctaaagaatcgaaagatgcttggatgcaagctggtactgctcgcgctgtattgaacaaccttgttaaaggtgttagcgaaggcttcgaacgtaagttgcagctagttggtgttggttataaagctgcggttaaaggtacagttgtaaaccttaaccttggttactcacacccaattgactacgctttacctgaaggtgtaacagcggaaactccaactgctactgaaatcattttgaaatcagcaaacaagcagttgttaggtcaagtagcggcagaaatccgtgcataccgttctcctgaaccatataaaggtaaaggtgttcgttattcggatgaagtcattcttcgtaaagaagctaagaagaaataaggcgcgaggttcttatgaacgaaaagaaacaatcccgtttgcgtcgtgcgaaaagcacacgcttgcacatccgtgcattgggtgcgactcgtttgtgtgtaaaccgcactccgcgtcacatctatgctcaagttatttcagcagatggtggcaaagttttagcgcaagcttcaactttagatgcatctttacgtagtggtactactggtaatattgaagctgcgacgaaagttggtgctttaatcgcagaacgtgctaaagcagctggcgttactaaagttgcatttgaccgttctggttttaaatatcatggtcgtatcaaagccttggctgatgctgctcgtgaaggcggcttggagttctaatcatggcaaaagttgaacaaaacgaaggtctcgttgaaaagctggttgccgttgatcgtgtagccaaggttgttaagggtggtcgtatcttctctttcacagcattaactgttgtgggcgatggtaatggtcgcgtaggttttggtcgtggtaaagctcgtgaagttccagctgctatttctaaagcacttgaagctgcacgtcgtaacatgatcactgtagaccttgctggtactactttacaacaccctgtgaatgctcgtcatggtgcaagccgtgtatacatgcaacctgcttcagaaggtactggcgtaatcgctggtggtgcaatgcgtgccgttcttgaagctgcaggtgtacataacgtacttgctaaatgttatggttctactaacgctgctaacgtagtaaacgcaacttttaaaggtttgcgtgatatgacttctcctgagaaagtcgctgcgaaacgtggtaaatcagtagaagaaattcaagggtaatcaatcatgaaaacgattaaagttacccagactaaatcttcttcacatcgcttgaaaaatcacaagctttgcttacaaggtttaggtctgcgtcgtattggtcatactgtagaagtgcaagatacgccttctaaccgtggtatgatcaacaaagtctactatatggttagtgtagaggaataagccatgactctgcgtttaaatgagcttgcacctgccgaaggtgcaaaacgtgaacaccgtcgtttaggccgtggtatcggttctggcgttggtaagactggtggtcgtggtatcaaaggtcaaaaatcacgtaaaagtggtggcgttcgtccaggtttcgaaggcggtcaaacagcgatttatcgtcgtttacctaaattcggtttcactagccaaatcgctttaaaaactgctgaagtacgtttgtctgagttaagtaaagtggaaggcgatatcgttagccttgaaactttaaaagctgcgaatgttgttcgtcgcgatcaaattcgcgctcgtatcgtgctttctggtgaaatcactcgtgcattcactgttcaaggtgttgcattgactaaaggcgctaaagctgcaattgaagcagctggcggcaaagtcgaggagtaatctcgagtgtctatgtctcctagttcttcaggtcatgtcaacatgatgaaaggtcagccatttcacgtgaaatatcgtgaaattattcgccggatgagttttctaatcggtgcattgctggtctttcgactaggagcgcatattccagtaccaggcattaataatgctgcgttagaaaatttatttcatgcaaaccaaggaactattcttgggctattcaatatgttttctggcggtgctttagagcgaatgtcgattcttgctttagggatcatgccgtatatttctgcatcaattattgtgcagttaatgtctacagtgattccttctctcgaagccttgaaaaaggaaggggagcaaggtaaacgtaaaattaatcaatatacgcgtcagggtacattattacttgcagtggttcaggcagtaggtatgtgtgcaggtcttattggacagggtattactctatctagtggtcttgctttttatataccagcagttacatcacttgtcgcaggaactatgttcttaatgtggctaggtgaacagatcactgaaagaggtatcggtaatggtatctcaatgattatttttgcaggtattgttgctggtttgcctaaattaattatgcaatcagtatcatctgtcgataatggtcaaacaagtttaattggtcttgttatctttggtcttttgtctcttggtgtattggcagcgattgtgtttattgaaaaagcacagcgtcgtattccagtaaactatgcacagaagcagcaagggcgtcgtatatttacagctcagcaaacacatctaccgttgaaaattaatatggctggtgtgattcctgcgatttttgcgagctctttactcttgttcccagctagtttgggtcaatgggtaggaagtgcagatccgaatgctggtttaattaaacgtagtttacaagatttagctttagtattgtcgcctggacagcctttgtatttggtgctctttggtgcgttaattatctttttctgttacttttatacggctttagtatttagccctaaggaagtatcagaaaatctaaaacgcagcggagcttatgtgcctggtattcgcccaggtgagcaaactgctcgttacttagatcatattcttaatcgtttgacgtttattggtgcgatttatattacagtcatttgtttgatgccaatgattctacaaagttcttttggtattccattctatttgggtggtacctcattactcattgtagtcgttgttgttatggactttatggctcagctacaagcgcatttaacttctcatcaatatgacaatcaaacattaatgagaaaaacgactgctcatcctaagggataagcgcacttagaggtttcatcatgaaagtacaagcttctgtaaagaaaatttgtggtagctgtaaagttatccgtcgtaatggggttattcgcgtgatttgtagcgcagaacctcgtcataagcagcgtcaaggttaatctaatcaagacctgttgatttcagtaggcgaattgggttaatatccgcccctcaagatttttgtggggcggttgattatctctactgcctttttggagaaaagtgaatggctcgtattgccggtgtaaacattccggataacaagcatgctgttatctccctcacttacatctttggtatcggtcgccacactgctaagaacatcttagctgcagttggtattactgagactactaagatccgtgagttggacgatgcacagcttgatgcgattcgtgcagaagttgctaaggttcctaccgaaggtgacttacgtcgcgaaatttccatgaacattaaacgtttaatggatttaggttgctatcgtggccttcgtcatcgtcgcagcttgcctgtccgtggtcaacgcaccaaaactaacgcacgtacccgtaaaggtccgcgcaaaccgattaaaaagtaagatttctggaagctaaaagatggctaaagatactcgcacacgcaagaaggtcactcgtaccgtctctgaaggtgttgcacacattcacgcgtcttttaataacaccattgttacgattaccgatcgtcaaggtaatgcattggcttgggccacctcaggtggacaaggcttccgtggttcacgtaaatcaactccgtttgctgctcaggtagctgctgaagttgctggtaaagcagctttagattacggtttgaaaaaccttgacgtccttgtaaaaggtcctggtccaggtcgtgagtctgcggttcgtgcattaggcgcagtgggttataagattaacagcattaccgatgtgactccaattcctcacaacggttgccgtccacctaaaaaacgtcgcgtgtaaggagaaacattcatggctcgttatattggtccaaaatgcaaactctctcgccgcgaagggacagacctgcaacttaaatctggcgttaaaccatttgacgtcaaaactaaaaaagctaacaaagcacctggtcaacatggtcaggctcgcggtggtaagcaatctgagtattcactacaattacgtgaaaaacaaaaagtccgtcgtatttacggtgtgttagagcgtcaatttagtaactactataaagaagcagctcgtgttaaaggcgcaactggtgagaacttgttgaaattgcttgaaagccgtcttgataacgttgtttatcgcatgggttttggttctacacgtgcagaagctcgtcagttagtaagtcaccgtagcattactttgaatggtcgtcgtgtaaacatcgcatctattcaagttaaagctggtgatgtaattgcggttcacgaaggtgctaaacaacaattgcgtattaaaaacgcgattgaattggctgctcaacgtggtattccagcttggatcgaagttgatcactctaagcttgaaggtacgtttaaagctgcaccagatcgttctgatttacctgctgaaatcaacgaaagcttgattgtagaattgtattctaaataatccttgaggtagcaataatgacgcgtactgcaaacgagtttctaactccgcaagcgatcaaggtcgaagcggtaagcgggacctcggcaaaagtgattctggaacctttagagcgtggttttggccatactctaggtaatgctttacgtcgcattctattgtcttctttgccaggcgctgctgtggttgaagtagagatagaaggtgtcgagcacgagtacagtactttagaaggcttgcagcaggacatcgtcgagctcttgctgaacctaaaaggattgtctattaagctgttcgatcaaaatgaagcttatttaacattagaaaaacaaggtcctggtgacattactgctgccgaccttcgtttacctcataatgttgaagtggttaacccagaacatttaattggtactttgagtgctacaggctcattaaaaatgcgcttgaaagtttctcaaggtcgtggttatgaaacatctgactctcgtttccctgaaggcgaaacacgtcctgtaggtcgtttacagttagatgcttcttatagcccaattaagcgtgtttcttacaccgtagaaaatgcgcgtgtagaacaacgtaccgatttagataaactggtaatcgatcttgagaccaacggtacggttgatcctgaagaagcaatccgcaaagcggcaacaatcttgcaacaacaaattgcaatttttgttgatcttcagaaagaccaaactcctgttgctcaagaacctcgtgaagaagttgacccaatcttgcttcgcccagtagatgatctagagcttactgttcgttctgctaactgtttgaaagcagaaaatatttactacattggtgatcttgttcaacgtactgaagttgagttgttaaaaactcctaaccttggtaaaaaatcgttaacagagatcaaagatgttttggcatcgaaaggtttacaactcggtatgcgtcttgagaactggccaccagctagtcttcgtatggacgaccgttttgcctatcgtagccgttaattaagtaggactatcaccatgcgtcatcgtaatagtggtgtgaaattaggccgtacaagcagccatcgtaaagcgatgttccaaaacttggctaattctttatttgaacatgagttgatcaaaacaactttgcctaaagctaaagaattacgtcgtgttgctgagcctttaatcactctagcaaaaaacgatactgtagcaaatcgtcgtttagcatttgctcgtactcgtaatgctgcaactgttggtaaattatttaccgtactcggccctcgttacaaagaacgtaacggcggttatctacgtgttcttaaagcgggcttccgtgctggtgatgcagcaccgatggcttacgttgagcttgtagatcgtgaagtgaacacttcagctgaataattgatattattcaaaaaagaccggctttatgccggtcttttttattttccaaaaaatataaaattaaaaatttgtccccaagtgacataaaaaaacggataaacggtcaaacttgacattgtgtattgtcaaaattgtgatttaataaagttatattctcaacaatgggtataaaaataaaatggaaaagcaagttgatgtattaatcattggtgcaggcatatcaggaataggagttgctgcccatttatctaaaaactctccacaacgtcagtttgaaattttggagcgtcgtgaatcgtttggtggaacttgggatcttttccgctatcctggtatccgttctgattcagatatgtctacttttggttttaactttaaaccatggcgcaaagccaatgttctcgctgatggtgcctctattaaaggatatctaggggaagtgattgatgagtttaagttaaaagaaaaaattcattttggccatcgtgtcctttctgcgaattatgattctgccttgaaaaagtggcatgttattgtcgaggacaataagaaaaaacagcagacttgggttgctaacttcgttgtaggttgtactggttattataattatgaccaaggttacgcgccgactttcccaaatcaagaagctttcaaaggtcaactcattcatccacaacattggccggaaaatttggattataagggtaaaaaagtagtaattattggtagtggagctacagcaattacactggtgcctgcaatgtcaaaaggtggagcaggtcatgtaacgatgttgcaacgttcaccaacttatattgcttctgttccgtctattgatttcatctatgaaaaaactcgtagatttatgtctgaagaagcagcctataaatttacgcgtgctcgtaatattggtatgcaacgagcaatttatgcattgtctcaaaagcatcctaaaacagttcgtcgtttactcttaaaagcaattgaaatgcaacttaagggtaaagttgatatgaaacactttacaccttcatataatccgtgggatcagcgtctttgcgtagttcctgatggtgatttattcaaaattcttcgtgaaggtaaggcgagtgttgagactgatcaaattgaaaaatttactgagactggtattcaattaaaatcaggcaagcatcttgatgccgatattatcgtatctgcaacaggtttgcaggttcaaatcatgggcggtgtgcaggcaactattgatggggaaccagttaaatcatctgaacacatgctttataacggcgtgatgctcagcgatgtaccaaacatggcgatgattattggctatgtaaatgcttcatggacattaaaagttgatattgcagcagattatatctgccgtttattaaactacatggataagaataattatgatgaagtgattccatctggtgataagagtgtgatggaagaggacacagtcatgggtagcttatcatctggttatattagtcgtgctgccgacgtgattcctaaacaaggtaaacaagcaccatggcaggtaaccaataattatcttgaagaccgaaaatcattaaaaaatgcaaaatttgatgatggtgttctacgttttcataagcattcagaagttaccacacgtaaaccaaaattagtgtcttgatattcgaaaataaaaaggaggctataagcctcctttttatagtaaagattaaagagttctagagattaattctttcataatttcattggtgcctgcataaatacggtttgctcggtggtcgatataagcgcgtgcaattggatattccatcatatagccataaccaccatgtaattgaagacattcatctacaacttttgaaaacatatctgaaattttatattttgcagccgctgcagcttcaacactcaatttttcatcgagttgtaattccatacaacgatctaaataggtacggcagaaatctatctctgttctaagttcagcaagtttaaaacgagtattttggaatgctccaattggtttgccgaatgctttacgatcttttgtatattgaacagtatgtgcaaatgccgcttctgccccggcttggcagataatagcaactagcatacgctcccacgctaattctttcatgagcatgataaagcccataccttccatacctaaaagattttctttaggaacacgaacgttatcaaagaagagttcacaggtatcttggcctttcataccaattttgttaagtggtttgcccttagtaaaaccagcacggtcagcttcgacaataatgagtgataaattggcagatcctttatcgctattccccgttttacaaacgacaatcgccatatcgcataaatagccattggtaataaatatttttgaaccattaatgacatattcatcgccatcaagaacggctgttgtacgaaccgcttgcaagtctgaacctgttcccggctcggtcatggcaattgcggtaaccgtctcaccagtagccattttagggagccatttctgtttttgctcttcattaccgaagttattaatatagttggctacaatgtcggaatgcagtgagaaacctgtacttgagtccatcgcataggcttgttcttcaataagaatcatgctgtataggcggtcgacacctgcaccaccatattgttctggcatagtagtacagagtaaacctaaggcaccagctttattccaaagatctcggtcaacgtgttgttgtttttcatatttttcaatattaggtacaacttctttctcgtagaatttacgtaccgtttcccgaaaagcttcatgttcttcgttaaataaatggcgaggtaacatatttggaatgggacgaatagcaccagattgcattgtatttcttccttggtttgggcttaatgttatgagctaaacataagggaagcgactaggtctaacaatgtgatgaatgctcatttatggcggtgaagtgataagtttggtcaatttgatatttttagcgaactttctcatgtgatcaggtaaactaagcgcactatcaacgcagatggggaaataaatgtctgaagaaatgaccttggaagaacgtaaagtaatctatcgcgcacgtcgtggtttaaaggaaattgatgtctattttgacccttatgtgaaaaattattatttaaaggcagacccggcagaaaaagcgttgtttgctgagttggtagaacaggaagaccctgatttactagattggtttatggaagtatcagaaccaccacgtaccgaattacgtgactttatctataaattaaaacactatgttcatggttaatttattttgatcaaccatttgaattttaagctgaaatatagtcgtttttcgattatatttcagttttttattggcttaagcttagcagttctattttatcaattaatgccgttactatggtggttagttgtaatcagcttactatttatcagctttattttctttttaaagcgtccgcagcttgcacaaattgcttatttagataaaaaactatggtcgcttgcttataagtcacagaacaccgtttctcgcgtcaaaattttaaaaataattgattgtcagattttcatagtgatctattttgaaggtcataaaacactaacttctatcatttggtttgatcaaatgtcattagcagagtggaaaaagcttaaaactttagaaaaactctattaattgttagacaattctacatttgtatatttatttaaaattattattaatcaatatcttatcttttatttctttttgggaaactgaaattgtctagttaaaatacagaaaaaacagcaagaaagttaattgtcggacaatttctcaatatggttactattctatcggttaaagtacaaacaccaacgtaaagtgtgtcggaggtctcaaatggagatgccaacatggtcgttcttggtcattgccataattatggcggtggtgataggaagagcaggaactttactcagggaacatcttaaccgagttaatcttagcaaagttaagagacagaggatgcaaaggtcatcgatcagtcaataatctaattggttaatcgattaatttcatcaagtgtccagtttttaactgggtgcgaacgtagtaaggaggtctctcatggagatttcaatgtggatgtttctgttgattgcagtaattatggcagtagtagtaggaagagcaggaactttacttaaggattatctagaacaacaataatataagccgttaaaagcttatcccagttaataagtagcatgtgctgaaccgtcgcaatgctacttttttttgcctaaaatttttgtttccctgaaaaactgtcaattttatctgctgtgaagtgtgtcaaagtataagcgctacaattagagtaattactcttttattcaagatatgcatctgctaatgtacatctgaaaaggaaaaaacaaattacatcgaggacaggaagatgtctaaagtccaaaaaatatgccaaggtttggcggtaagttttcttgcagcttcagttttatcaggttgttcatacgttgtgaaaagcggagcaaatgttgctttaggttttacggaaaagcacgtcgttccacctattttggcaatgcaagatgctgaaatggtttgtaatactggtagtgccttaactcctgcaatcatgtcgactaaaggtatgggggcagatcctactcgtgttgctgtcttaatgtatgctgcttcaggtgtatgcgcggaaaaccaagcattagaacaggagttacgttatttgcgcgcttcaaaagcagggcaggtaacagaagctcaagatgcacgtattgcacagaagcgttgggctgcaattgctgctgagcgacaatacgcaggctataagctctttgctgatcgttgggaatctaaatataaatatcatttaggtgattcttgtccaacaatgcgtagtgatattgaccaaactgtatatttacttgggatgatcagtggtcttcaagctgtgaccaacgacattaactctggcggttctgtcaatgttccgaaagatattgctgctattgtagagcgcggtatggtctgccttgataatcaaaaattctggggcgcaccaaatgcaacgcgcgcagtgatctggactttattaccaggcgctaatgaagggaagcccgatccatatgagactttaaaacagtccgtgcaaattggtgaacaaaaaggtgttcgtttatctcatgcgttatatgccgtagctgctcaagcgagtggtgacgatgccaaaatccgtgatgcattaaaaacttatgctgcatctcaagcagatgacaaaccagtcaatccgaactttaagttaattgatagtatggctggtttaattgtgcgcggtatttctgaccgttactggactgagcatactggtgttcgtaccggtgatgacggtatgtctcatttctgggatgagaaaaacgaaggctcagctgaattggatgagttgtttgatggtggagctgcatcggaagccccagctgacacaaaaactgcaccagcacagtaaatagatctgaaggaactcactccttacggttactaactctagtaatcgtaaggagcctggtttaaaaggagtgtgctatgaaagatcatgtactcaataaaaaagtgcttttggtcgcagggtgcatttctgtttctgcatgtttacaggtgtttccggattattttatctattggcgtgaaagcttactcggcgagttctggcgtttatggacagcacactgggtacatgtcggatggattcactttcttttaaatatgatggcatttgcgtgtttgcctttcatatttccccataccaaagtgtggcacattttaagtcttcttattcttttaccaccttttattagcttggtgttctatttttatttgcccaatatcgatgcatatgcaggcctttctggggtactccatgggttatataccgcagttgctttggtttacttgcaataccgtaaagaaaggaattttgcatttctggtcttaggtttaattgttgcaaagttaatttgggaaaatacatttgggcaaacaggaacagcacagctcattggtagtccagttttaactgaagctcatctatatggggcgattggtggtgcaatctttggaggatgctattggctcatacaaaggttcaaatagaaagattgacaatacaaactgttaaaaaagtgattttagtcattctttattgataaagtttgatgcaaatttgatcgttgaataaagggattggtagaagggggatggacgatacccctgaccaaggaaattgcatgactcaaagcctttgttatgagggatttgagagaacaaaattggaatatttatgcaagaatatcaagaaaaaagatctggattaggtctgctgggttatatctggaatgaatggatctcaacattcattatcctcattttactattgatgacgctcataattggtaccggggaaatgatccacggtcaattattacgtatcggggaacgtctttatggtgaccctgctacaggcatgcaatattcattcttgcgtgctgagcctgaaaagccgacttgtgatcgacatccgaatattgatgctcaagtaaaagagcagatgaaagcaaatgcatctgatgattttgcgagcttctttggtgctgcatcggaaagtgatgtccgtgcatccttactggcagcacagcagcaatgtgaagaaaaatatcaggcttatgacaaaactattaaatatatcgaagcaaacccgggagtacgtacttatcgtgcgatcgaaacaggtttctttggtatttttaaattcggtacagagaaccgtgccattttactggtctttatggtactgatttcagcgattactgcatcattgaaataccaccatattggcttgcgtaatccagcaacaaaaatagattacaaagtgtattctctatttatgttgattggtaatgcgctactgagcttctcggtcattagccagtatcgttcagtcattaattcaggggtaacacctacttatgaaacagtaacgatttactggatatggatgattctgtttgttgttctgaccttaattagtctgtatcaactatttgtttcacctccaccaaaacgtgaaggcggtaatataggtttagccttactttctgtacctttatatgcttatatggcactaattacaggtattgtattcacgttctttatggattatccaatggggcaagggatttaccttggtttattggttgagttctcgggtatcttcttaaatcttgccttatttatttgggcgggtatgttactcacgcaaacccgtgttatggacttgttcttaaatgtacttcgtccatggaacttggcgccagaaaccttaacttggttaattctgattgctgctgctgtaccgactgcttataccggtgcttcggggattttcgttatcgcggctggtgcgattatttataaggaagtttggaacgcaggcgctcgccgtcaatatgcattagctgtatctgcaatgtctggctccctaggggtggttgtacgtccatgtctcttggtcgttctaattgcgatgttggatagtcgtcatgttacatctgatgaattattcggacatggtatttatgtcttctggctaacagcatttattttcttgggtgtatcccttttattggcagaagaaaagttccgtgtgaactcgccaaaagtggcactaccaggtatggcacgagctttcgtaccagttattccatatatcttaattactgtagttgtccttgcattttataaatatgcattagatacaggaatgaatgaatttactgcaccagtgattctgccactcgtgcttattgcgatgattctgtacgataaaatggttatgcctaaagaggcaccagctttaaatattcatgaggcgattgttcgtgagcatgaaaagaaatcaccgttcttacagactcatgatccgcatagttcacagttccgtcttggttttagtggtgctttacgttttgcgacatcagaaacagtggggcatatcggtgccttaattattttgatggcattgtctgcaagtgtaggtggtttaattgaacgctctgaagtggtcgaattattaccaactcatttaggtagtatctatatatcactggcatgtattgcactgttacttgcaattattggtatgtgtacagatccatttggtgccgtaattttagtggcagcaactattgctcctgtagcttacgaaaatggtattcatccaattcacttctggatgattgtattggtcgcattcgaatttggttatgtaacgccgccagttgccttgaaccatctattaacgcggttatccgttggtgatgatgaggtgaatgctgccgatgcagaagccaaagagaagtacacaagtttctactaccgatatgaacgctggttattaccaattattgtcttgttctcatcattggtattggtaacttatgcaccactaatactgaaattatttggttggtataagtaatttaaatatataagccgagcaaaaacactctctttaagagggtgtttttttatgtggtagttatttgaagcatataaatttttagtaaataaaaaagctagctcagagtgaactagctttttgcatcatatctagagttaaacaaatactattgttgtttaacttgggcctcaagaagcttcacttgctcttcttttagcttaataagttgatctgcatcagcatgttgagcttttaatgtcgcttcctgatcttgcaattgacgatgaatgtcattgagtttagacacttcctctttagctaaagattcttgagcaggaattggttgtttgagcacatcttcattcacaagttgctgtgagttagcagtttgtgtttgaactacgggttccgagctttcagatggatttgtagttttttcaggagctggtaccgaggctggttgtggatcaaccattggcgctgatgtttcagtttttttgaaaaaccattgtgctgcgaaaaaaagcacgacgagaatgcttaagcccccaattaaaatccacaatagttttgagttttgttttctttgtagtggcatgtctaagacctttagtcagaacgacgaggcttgaactgtattaccccaatttcatcaggtatagcgggcgtttcaggctcatcaatatgagtcggacgattttcgctataaccgcattcgatacattcaatccattcgtcttcagcggtggttagcatgacaatccgatctatggcttcacattttggacatttagccccagcaatgaaacgtttcttcatctttatcaccctaaccacacgatcaatttaggcccatagtttaagcggttttgttatcgttcgtccaaccttgatgacgtaacaatgcatcaatttttggctcacgaccgcggaaattcacaaatgcttcaagagcagtatctttcccacccaccgctaaaattgcctgacggaattctttacccgtttgagtattgaaaataccttcattttcaaaacggtcaaaggcatcacttgctaaaacttctgcccatttgtaagagtagtaacctgctgcgtagccgcctgcaaaaatatgactaaagctatgctggaaacggttgtagtcgacggttggaactactgcatattgtttgcgaatatcatttaaggtctgctgaatttgctcactattcaacgcaggagttttggtgtgaatagttaagtcaaataaggcaaattcaagctgacgtaaagtttgcataccagactggaagaaacgtgcatttaataaagcatcaagtaactcctgaggtaaagtctgcttgctctcaatatgctcacttaaaacatcaagactttctttatcccatgaccagaattccataaactgacttggtaactcgactgcatcccaagcaacgccgtgagtacctgcaactgagatattatctacttcagtaagcatatggtgtaagccatgaccaaattcgtggaataaggtgatgacttcatcatgagttaataaggcgggctggttgcctacaggtggagtgaagttacacaccatatagcaaattggtttttgtaaaccatgaacagtttgcatacgtgagcggaaaccactcatccatgctccaccacgtttccctgtgcgcgcatataaatcaaagaagaagccaccaacaacttcaccttggtcttctaactcaaaataacgtgcatctggatgccaaaccggagcttcacgttcaacgatgttaataccatatagacgctgtacgatctggaataatccctgaatcacttttggtgcagggaagtaaggttttaaagcttcttgtgataagttgaattgttgttgtttaagcttttcagaatagtaagtggtatcccaaggtttaagctcatcaataccatcttgtttggcaatagcttggagttcggcaacttcttgaagtgcaggggtacgtgcatgctcagctaggtcgaccaaaaagtcgtgaactgttttgacatcaggagccattttgctggcaagagaatattcagcatagttattaaaaccgagtagttttgccatttcttggcgaagactcaggatttcttccataattttgctgttgtcaaattctgtttgctcagactgatctgatgcacgtgtgacataagctttataaagctcttctcgcaaggcacgatcatcggcataggtcatgatggcaaaataagctgggaaatctaaagttgcgactgcttggtcaagctcacgctgtttaccgtactgttttaataactcaacattactttccggaagaccttttaattcgtcttctgtcagtggtttaaaataagcctgtgtcgcatcaagtacatggtttgagaagtcagaagaaagctgtgaaagacgtgcagaaatttcagcgtaacgttttttctcttcaccctctaaagcgacaccagaaagtttaaaatcacgtaaagcgagacggatggcactttgttgcgcagggcttagctttgaatagctctgactatcatgtatgagttgataggtctgatataacgccgtgtgttggccaagctgagtgtaatattcacttaaagcgggtaatagtgattgatagacttctctggtttcagcattgttcatcacagcatttaaatgtgacaacactccccacgattcactgaggttattttcaagtgcatcaatttgttcaagcacggcaagttgctggtctgtctcggatggtgcagccgtaagggtgtttaaaaactcttgtcctgcttgaatcgcttgttgaatatcttgttttaaattatctaatgtaatttgatcaaagcggggagtaggtagagtcgcttgctgtaaagtcattgctaatagccacattattttttaaacatagtattagatgtaggtattgttaggcaggaaatcaagcttaatttaaaaaataaacgttttaaaaacattaagcccccattttgggagcttaatcataattaatgcaaatacctatgaattagtcagccttagacttggcgtttgactttttctttttaggtttcgcttttttctttactttttctggtttggcctctgcttttgtagaggttttcttacccgactttttactatatgaacttggtttgcctttttccttctttttacggacaggtttttcaccatcagttgatacagatggtttaccaaaaacttcttctgttgcttgtgtgctagttttggttgtgcgtggagcacgactacgaactacacgtccagcatgagtaacttgtttaatgagttggaaatcgattttacgctcttctagatttacaccagcaacttgaattttaacttcatcgcctaaaccgaagacttgaccacgattttgtccaatgaggttttgactggcttgatcgtaaataaagaaatcatcgccaagttggctaatgtgaatcatgccatcaacataaagatctttaagagtaacaaataggccaaattcagttaccgcactcacaataccaatgaactcatcacctaaatgttgttgcatatagtggcatttcaaccaagtcgttacgctgcgggatgcttcatcggcacggcgttctgtttgagagaaatgttcacctgcatcatctaaagctgcaccggaaagtgggtaaggcttttgttttagatgagctttaattgcacgatgtaacaataagtccgggtagcggcgaattggtgaagtgaaatgtgtataagcttcataagctaaaccatagtgacctgcatttttggcaccatagtaagcttgcatcattgagcgtaataacacggcgtgaatgcttggcgcatcaatacggtctttagttgcctcaataactttttgatagtctgcctgagttggttggtcagggaaaggtaaacccaatagttttacaaaatcttttactttttgaatacgtgagaattcaggtgcctcatgtacacgatacaacatcggaatatcatgttctaaggcatattctgctgctgctacattggcaagcaacatacactcttcaataagcttatgagcatcattacgtgtacgaggtaaaatttctttaattccacctaactcgtcaaaggtcatataagtttcaatggtttcaaactccattgcatgacgatcaacacgtaagtttttcaaaatctggtaaagctggaaaagtgtatttagcgatttatgaatatcacgatcttttggaattgcatcagtggcaccttcaaaatattgtcctacttgtgtataggtcaaacgtgcttttgaatgcatgactgccggataaaattcataacctgtaacacgacccgtacgagaaagttttaggtcacagaccatgcataaacgatctacgtgtgggttaagtgaacacaatccatttgataatgcttctggtagcattggtaaaacaaaatgtggaaaaaaaaccgaagtgccgcgctcttcagcttcttcatttaatgccgaatctaatcgtacataatggctcacatcggcaattgcaacgacaactcggtaaccaccaccaggacgtttttccgcatatactgcatcatcgaaatctcgcgcatcttcaccatcgattgtgacaagtgccaagtctcttaaatcaactcgaccttcgcgatcttgttcagcaggttctttgaaactttcagcttcttttataacttcatctggaaattcgtaaggcaaaccaaactctaaaatggtttgcggaataataatttcagtatcggctttatctgccatagactgaataatatgtgccgttgcaaattcttcccgggttgggtaagtgtctatagcaacacgaagcatatcgccgacatttgctttagcatgttcaactaattctttttctagtgggataggttgatgctgatttggattgttaggctgaataaaatattcgccctcatgtaccgacaatttaccaattaactgttttactcgatgctgtataacttcggtaatgaaaccccatggtttacctttgcgatctaccgatgtctgccgaacacggacccgatcaccattaaagactaaacgtaactcacgctcaggtaataacaaatcatcttgaccatcaatatgtgctgtacccaaacctttactattaatatagacagttgcttcataggtaggttggtctgccaccaactgaaacttaaaaccatccttcataagttggccatcacgaaccatagcacttaagcgatgacttaaggcttcaatacttttctgatcttgaatatgaaaatggtcaacaagttctgcatgagattgcggtgtttgcaattgttccaacgtatctaaaataagagtacggcttggaataggattgtcataacgttcagcttcggcttttgcttcggggtcaacccagttttttgtcatgtcgtttggtttcatgcttggcagataggtttagcataagacatgcagaccagaactgcacgttcaggtttgcaataatgtgttatgcactactgtgttgaaataaagaaataatatctatcttaacaagcgtttgattgaaaaaggcgaaaagaatacgaaaattgtttaaaaaatatttaattgaacgaaaaaacaagaaaatttcagtatcatgacttgaacaatgtagttttagtttgtattatggcggctcgttccggtgaggtggatgagtggctgaaatcacttccctgctaaggaagcatacctattactggtatcgagggttcgaatccctctctcaccgccatttacttaatgcgctcatagctcagctggatagagcacttggctacgaactaaggggtcgggagttcgaatctctctgagcgcaccaagtaaaatcgaatgaatcgctgaaaagcacacaagttacgcgctcatagctcagctggatagagcacttggctacgaactaaggggtcgggagttcgaatctctctgagcgcaccaacttgaagaattaaccgcttttatagcggtttttttgtatctgctgtttattaatttttaaaaatctaaattttataactttttaattatattagagataacgataaatgaatctggctttattcgattttgatggcacgatcacccataatgataccttcagtttattccttaaattttctttgagtaaaaaaactcaaatattaggtggcatccgtcttgcaccttatatagcgggttataagcttgggtgggtaacggataaaacgatccgtactaagctctgccaagtgggatatatcggctatgatgcagcttctttgatatgcaaaggacaagagtttgctaaaaaagtaattccttcctgtattcgtgaaaatgctttaaaacgcattctctggcataaacaacagggagatcaggttgttgttgtatctgcttcattaagtgtttacttggaaagttggtgtaaatctttagatctggatgttatttgtaatcaacttgaaatagataatggtattttgacaggttattttattgatggtgattgtggttatttagaaaaagtaaatagaataaaaaataaatatgacttaactcaatatactataatctatgcttatggtgatacacctaatgattatgcgatgttggagttagctcatagaaaatattataaatggcaagagattaattaatatttaaaaatatattaaaaaagaaagccacttatataaagtggctttctttgtaattattaaacagtattgaatgagttttctaggaagttatcagtaagtaatgatgtcggtacgatcgtatgcgttgtatttgttacgctagatactgtagaagttacaccaccgagtaagctaccaccagtcaatccgcctagcaaattagaaataacatctaaactgccttcaccagtaacaccacccgttaagcttccaacgatatccgttacgataccgatagggttgtctgtaccgccagtaacaccaccagttaaaccgccgagcagatcagtgactacgccaagcggactgtcgccacctacgctaccagttaaaccaccgagaaggtcagtgactacaccaagcggactgtcgccgcctacgctaccagttaaaccaccaagtaaatcagttactaaacctagtgggctatctccgccagttacgccaccaatagttcctgttactccaccaatgatttcagttactaaaccagttgcagttgtaccatttgtaataagcgtatcgagaataccggtagccgattcagtagcgccttgaatatcaccaccgactaaatcagacacaacttcaagagcaccattgaccgtgtcacgagacgtttcaaaagttaatgtgccaaggtctgcaatttcagaaactggatgttctgcttgtggaaggataccgataattgtatccgcaactgtatcaataccagtattaataatttcagtttttaggctttcaacgccttgaagaatatcgatgccaccttgaacaacatcgattactggagaaataggagatgtaccgccaccaataataccaccggttacgccgccgataatgtcagttactacaccaagcggattgtcaccaccaataccgccagtaacaccaccgataatatcagttactacaccaagcggattgtcaccaccaataccgccagtaacaccaccgataatatcagttactacaccaagcggattgtcaccaccgataccgccagtaacaccaccgataatgtcagtcactacaccaagcggattatcaccgccgataccgccagtaacaccaccgataatgtcagtcactacaccaagcggattatcaccgccgataccgccagtaacaccgccgataatgtcagttactataccgagcggattgtcaccaccgataccaccagttacgccgccgatagtacctgttacgccaccaagaatatcagtaacaattccagtcgctgttgaaccattctgaataagtgttcctaaaataccagttgcattttcagtagcaccttgaatatcgccaccgactaaatcagaaacaacttcaagagcaccattgaccgtgtcacgagacgtttcgaaagttaatgtgccaaggtctgcaatttcagaaactggatgctcagcttgaggtaatacaccaataatagtgtcggctactgtatcaataccagtgttaataatttcagtttttaggctttcaacgccttgaagaatatcgatgccaccttgaacaacatcaataactggagaaataggagatgtaccgccaccaataatgccaccggttacgccgccgataatatcagttactacgccaagagggttatcacccccaacaccaccagttacaccgccaataatatctgtaatcacttcaagtgggttgccatcaacaccgccagttacaccaccgataatatctgtaatcacttcaagtgggttgccatcaacaccaccagttacgccaccaataacatcagtaacacttccaaccacaccagtaacaatacctgtagcagttgtgccatttgtaataagcgtatcgagaataccagtcgctgattcagtagcgccttgaatatcaccaccgactaaatcagaaacaacttcaagagcaccattgactgtgtcacgagaagtttcaaaagttaatgtgccaaggtctgcaatttcagaaactggatgctcagcttgaggtaatacaccaataactgcatcagctacagtttcaatgcctgtattaataatttcagtttttaagctttcaacgccttgaagaatatcaatgccgccttgaacaacatcgattactggagagattggagaagttccgccgacaacaccacccgttactccgccgataatgtcagtaacaacttcaagagggttgcctgtaacgccacccgttacgccgccaataatattggttacagtatcaattgggcttgtagaacctacagtacctgttacggtaccaactacattagaaactaagtctgtggttgtatgtgaaactgtatcggttacagttgaaatcacattagaaagtaagcctgttgttgaaacattagcaatgttgatatcagaaacatttacattaacagaggaacctgtgtttactacaggggttatcgatacaatattacccaggtcctgagtaacttttgatattgaagagacgagatttttcagtaagaacatggtggtctatttcctgtgtatttatgtatttttaagtaagtatttatatattgcgttacgcaattattgagatatgtatcgcaataattaaaaattagtattgtgtagatctcaaaaagtgtcaatgcatatttctactcaaataaattgatacttataatattttgacaattagttattctttagatttagacataaaaataataatttttttataatatattctttatagatgaatacattttttctttatttttttattattttttatgaatattaaagctaactaattttatttataaaaagacttttgcataagtagaaatattttatttatataatcctgactaaaaaactagacttttgtttctgccaatttggccaaaatgcccaaattagatacgagaaatagagaactttaattgaaaaaaaatatttcaaatacattttataggcaatcatctcgacttttttgaagctaatctacttaaatatttcattatggctaagaactagacgcttgatgacaaaaagatgaaaaatgtctttctaaaatgaaaaaactgcgtataatgccctccatcaagtacgcgctcatagctcagctggatagagcacttggctacgaactaaggggtcgggagttcgaatctctctgagcgcaccacttgaagaattaaccgctagatatagcggtttttttgtgcctaatttttatattttttttaataaagaaagctggtacttgtgataaccagctttaaaaaaatctaaattcgaagctatttattagccgaatgttttgaagcggctttcatcatcaataaaagctttttcgcctgctgcgccttcaatagaaccaaaaactagctgagctcttagtttccattctgctgggatattaaatgaggtattaattttctcatcaataattggattgtagtgttgcaatgaagcaccaatattttgttcagctaatacattccaaactgcaaattgagcaattgctgttgaatgttctgaccagatcggaaaattatcggcataaagttcaaattgctcttgtaagcttttaataacgctctggtcttcataaaacagaactgtacctgcgcctgctgcaaagctttgaattttttgttctgttccagataccgcttcagctgggataatggtttttaaaacttctagaactgtattccagaatttatgatgtgattgtccaaataagatcacagcgcgagatgattgagagttaaaagctgaagggctgtgtcttattgcttcttgaattaacttttcaatctcatcatttgattggcttaagttattgccaattgcataaatagagcggcggtttttaatgagttctataaaagaggtttcatttgaaggttctagctcttgagcagctttcaaagccacatcttcttgagctgttgttttttgtttgaagccaaatagttttgcaaagaaagacatgacgaattccacgaaaagagacaatagaagcattctataaatttaaaaatatgaaataagccttataaatatgaatctacgttctatatatgaaacgcataagtagcttgtactaataaaagctttacagttaaagcaaaaataaaaaatcacttttgattcattttaaagcgtagatgaatatgctctaatagtttcgatttattcaatattgatacattgtgatgaccgagcaaaaaagcgctttatctttacgttattatttaaatttagaagagtctcaagacggatttggcttggtgacattcggaaagaaacaattcacacggtttttgacacctgttattagtattgcaattattatttggggcttatatttaggcttttcaggtgttggccgctactatgttgctttaggcgttttcttcttggttatgcaaggtctaatgcgctactggcttttacctatgatgtttaaacgtcaatttgtacgttatcaatttggtaagagcgagcaaggaatcgatttatatcaagattattttgagctctatgctgctgggcgtaaacaagctgtacagtatagtgaagtgcagacttttgctaaaggcaagctgacttatatgcttgagcttaaaaataaaacggtcatcattgtgccgaaacgtgcatttgctcaggcttcagatcaaactatatttgaaaatacatttaagaaataagttattggaattattagccgcaacaataaaggaagcttcatgaaaacacgtccttcaaaaatcgtttgtgtgggcagaagttatgctgatcatgtaaaagaactgaacaatgcaatgccaggacgtccggtgttatttatcaaaccaccaagtagtttgattggtttagatgaaggcatttcatggaatcctgcgtggggtagttgtcatttcgaatgtgaatttgttttacgcattgatcagccactaaaaggagaaactgatccgcaaaaagtattgcaggccattggtgcagtgactttaggattggatttaacattacgtgacttacaaaatgagttaaaagataaaggccaaccctgggaaagagcaaaggcttttgatggttcatgtgtgcttgcagactgggtagatgtgagtgaaatcacggactgggaagagactagatttactttccatattaatgatgaattacgtcaagatggtaatactgctttgctcatgtttaatattgcttatcttttagtagatattaatcaggtgttctcacttgagccaggcgatgtcattatgacgggtacacccgcaggtgtagggccattaaatgctggcgatcagttaaaaatgactttgaaaggtgctactcaagattttgtttgggaaacatttgttaaagcataattttatttaagttattaaactttaaaccctattattaaccggataatagggtttttttattatactcaaaattaatttattgatagagctttcggaactggtctggggtaaaacccatccaacgtttaaacatataaataaatgccgatgcgctggcatagcccaaatcaaaagcgatactttctatggtttttccttgattaagcatggtcattgctttcattacttttaatcgttgcctccattcatgtaaagacattcccaactctttttgactgtaacgtgccaacgttctttcagtcatatttattcgttcagctaattcttgcaaggtgctgttatcggcagggcattggtgtaaatcatttagaatttttgctaaagctggatgatctgttgtaggtaaataactacccactaattcagcctgtatgagttgatctaataaaacttggagtaggcgtatatattcgacttgggtttcatcgtgtgggttttgcctcaagtgatcgagtaaagcaggtacaagtgaggaagttaataatataccagctttctgcggtaacttttggcacagactttcatgaacatataaagttgcatgagtcacttcgttgcggttaataccactgtgtttggtataaggaggaagccaaataccataaggtggcggggttaaataattaatttgatcaatattaacttcgagtacaccactaaacgcataaataaactcaccccatgcatgcgcatgttgaggataaaccgtttctgcgggtgcattacgaacacggaaccaaagcaaatcaggaattgcgttatgagccggaatttcctgaaaatcctgcacacgttgagctgattttttcatctttgaaaattgcctgaaattgcttatgtattgtctgtttttcactatatcatctaaataagacagttctatagtcagatttttcgctataaataaaggtgctaaatggaagagcgcaaaaatctggataccagagcttcggctttaatggtgcttttatgtatggtcttagggctgcaacaggtagttctgaaaatagcagcaccagatatttcgccgattatgcaaattgctttacgttccggcttatctgctgttctagttttacctttattgtggcgagatcattcgattcatctattttcttatagacaatgcaaagctggcgctcttgttgctttatttttttcattagaattttatttcgtcacccaagccttaaagtttacctctacctctcatacagtagttttactgtataccgctccaatttttgttgcattagggcttcattggaaatttcctactgaacgtctgaatcgagcgcaatggggtggtattgctctggcttttatggggatcattcttacattttacccaacaaccacagctacaaatgcgccagctctagcacaagttttgttaggcgatttatatgcacttatggctgggcttgcatgggcactcagtacaattattgttcgtttatctcctttagctcaagcgccggcaactcaaacattgttttatcaactatttggctgttttgttctactcttattaattgcttttttaacaaatcaaacaacaattcatttcaccactttagcgatcttaagcttaagctttcaaactttaatcgtatcttttgcaagtttactattatggttttggttattaagaaattatcttgcatcacgattagggatattttcttttttaaccccattatttggtgtgttatttagtattttgttattagaggaaaaactagaaattaaatttatttttggaagtattttagtgttgtcaggaatagtcatcatgagtctaaagcagggcaaagctaacagcagctaagccctgactttagttgagtattatttctcttcgaaaattgttgaaagtggaatagagagctttgcagctaaataatcattagactctactaaagctgggccaattttttccatccattcgtcatcatcatgaacatttgatacatcctgacgtaaaggtaatggataaggcagtgcagtgaagaagctccaaaagtcgacttgagataaattgcggaccaaaacatattcatctttatcggtacgtttaaccagattttgctcttctagtaagagaacataagcaggccaacgaccaacctcaccacgacctaaaatttctaatgcttctttatcacttacgctttcaccaagtttttgctttttatagaacaattccaagatgtcgagtagcattaaaaccggatgtcttttttgctctttgcctgaatgaaaagcggtaagagcaaaactcacctcgacaccaagcaatacaatattccaagataagaagacccataataggaaaataggtactgctgcaaacgcaccatatatgatttcataactggtgaaatttgacataacaaagctaaataaatttttgagtgtctcaaataatgcagcacttaagcatgcagcaattgctgctgcatataggggaactgtgcggttgggaatagtccaatataaaataaaaaaacctaaaattgtgagaacaaaagaaataagccagagtaaaaaggcgccatcaagttgataacctgtgaagttattgctcaataaattcatggaagcaacagttgatgaaataacaaatgcactgcctaaaataattggaccaagcgaaataatggtccagtaacgcataaagcctacaataccgctacgggtttcttttactcgccatattcggttaaaaacggtttcaattgaagtaagcattaaaactgttgtgacaaagaggaatagcacaccaattacagttaaattactggacttttcggtaaaagcattaagagctttatcaaaagcaatcgtacttttaggtaaaaaattactgtagattaagtgctgtaactgttgtctggcaggttccaatgccttaattgaagaaataataactaaaaataccgttaacataggtacaacggcaaaaagagtcgtataggtgagggagccggcttgttcacggcaacgatccgcttcaaaacgcttaattacgaataaaataaattgaaaccaggtcttgttataaaaaggaagcttcttcaaaaaacgttctaacatgcgtcatctatcccgatttttttaatcatgatgtgggtgattgatattcaccagtgtattcggttgagaacactatcgttgatgtgggtaaactttaacctaaagaataaaaaagtattctgaaagttctgtatgtatcatcgtaacaaaaggtagtaaaaagcttttaccgatatttgttactgtgcccttaaaaatcaatcacctctagaatttcataaaattggctacgccaaaaaaacaaaaaataccgtatagtgttctttttaacaaaattcgtgaaaccgatgcaaccttacattcttgtgctttattacagtaaatatggttcaactaaagaaatggcgcaccttattgcgaatggtgttgaatcggcaggtgtgaatgtaaaaattcgcacagtacctaatattgcaacagtggtaacagaagctgagccaagcattcctgaagaaggtgatatttattgtactttagaggaactggccaattgtgcaggcttagcgctagggtctccaactcgctttggtaatatggcaagcgaaatgaaatatttttgggatcagaccacaagcctttggttaaatggtgctttacataataagccagcatgcgtttttacttcttctggttcaatgcatggtgggcaagaaagtacgttattaacaatgttacctccattatttcatcacggtatgatgattttaggattaccaaactctattccggctttgtcgaatactaaaacaggtgggactccctatggcgcaagccacgtgagtggtccaagacatgatcaaagtttaagccaagatgaaaaaattttatgtgaagttcaagggaagcgtttaggcgaaatcgtaaaaaaacttcattcttaaatttatggcaataaaaaagagcgggtttccgctcttttttatttaaactattttattcttttacaaaagttactgtgccatcagcaagtgattgaacgcgcgctaatgactcaacgcggtaacctttttcaagtaataaatcacggcctggttggaatgatttttcaatcacaatacccacacctacaacttctgcatttgcttgatgaattaagtcaatcaaaccaagcgcagcttgaccatttgctaagaagtcatcaatcactaaggctttgtcgcttgagttgatgtgcttatttgaaatggcaatggtactttctgtctgtttagtgaaactaaacactttagcgcggtataaatcgtcttttaaagtaagcgattgatatttgcgagcaaaaatcacaggtacaccaagttctaaacctgccatgattgctggcgcaatacctgaagcttcaatggtaataatcttggtaatccctgcatctttaaagcgagcggcaaattctttaccaatctgctgcatgagtacagggtcaatttggtgatttaagaaagcgtcgactttcaacacttgatcagatagaacgataccttctgttaagattttctgttctagtgcgtgcacgggagaatcctctagacggatgctttttaaagcaaatgcgtattttaaaaagcatccgaaaaaatgcaagctttaattcgttttacctgtataacttgttaataacaaaccataagatgttttgccatcaatatgacttaccttgactggaaggtagtctaatttcggagctagccagaaaattgtgctgcgctcaggtttcttatgttgtaaaacaactttcacggtatcaaatgtgccataagaggttttaattttctcgttgccttgtttaacaaaacgacgattttcaacttcttttgcatcggctagagggtaagacgatttaagtgaaccattttttaaatcttcacgaatctgtaattctgcattcagctcatcaagtacacctgcttgccaagcgaatgagcgcgctttatcgtcttttttcgtgctaatagtcttattgccaggattaaaattaatactcattgtgttgttatggatcaaaattttactggtacgactaaagctttgtgaaccaattttaccgtttgcaaaactaaatttacttgtttcacttgcagaagcgattccacctgcttttgctgtgaattgataagtccaattattgccttgttgactcaatgcacgtgtcgctgaacccatacctttattattgtaggtaaactgataatttgcctgaaatgggctcatggcaagtgcgtggctagagaaacttgcaataagcaaagttgtcgaaataccagttgcgatgctgaatgatttcagaaattttgttgccataagtaaatatccttgtacagactgataggtcagtgctgatgcatctatgacttttgcatattatgcctgttgatcatggagaaataatcaggatttatgctaaatatgtaatctctttgtgttttttaacagtgaatttctttagttcgtaccgttgttatacatctttttgctgtattggcgtaatttcagtatctccaagttcatcttcagaatcatcatcttgatcacggaaaagtaaagcagccagattaacattaccaaagacaactaattctgcttcacgtactcgtgcatagttgatatgaaccttgcctaaggtttcaataatactggcctttttagcaaaccaacggttaaggtctaagaagatcaggtcatctttttcttgggctacatcaaatcgctccagaatcatgcctaatggatctttttttagaattttgtgatagtaaaaaatagccgcttttacagcaattttttgccagaaatttttatatttagcttctacaatttgtgtgttactaatttgctcaaaaacaataagttgttgttctttattaaattccatctggataagttttaagtcgaccgacaaagtggtctctaaacctttaacatgcattgtggcatagagtcttaaccagtcatgataaagatctgcatgtagatcatctaaaaactcgacattattagtcacgtagcgttctaaggtggcatttagaaaagtttgcgataatgtaaaatctctttcttcctcaatgaaggcttcagcttttcggtagactttatgaagacgtttgactaatgaggaaaatagcgtttgcataaaagaacttccagaagatgatttactaaagaatccacacaatctttattatgataaaaaacaggttttgatattgcagtgtaacaaatttaattgatacattttgacaaaatgaaaatggataaatatcaatatttgaagtgaatcacacttttatccatatttgaatatcagtttatgttttattcggtaataccgtggggaaaaggcatctatatgcttttaagattatgttgaaaagaagtctatccatagagcctttttattattggtggcaagaccgagtctttatcgctgcaataatattagcaatcttactgcatatttttgtgttgctcatccattttgcgatgcctgcgccgtcagaacaatcgactaaagaaattgcaatatcgattcgtcctactgaagatgtgatcaagcatgcagactttttagcccaagctgatcaacaaggttcaggggcttttcgggaagctcatcggatgtcgagtaactctccagcgcctatgccaagtgatgcttcaacaggagaagctcagctagaaactttagaaaaagtgcagcaacaaagagaacttaaatttgaagaaaaagtactcatgactgtattgagttggcagaaacaagcagaggagagccaaagaaaaaaagcacttgaacaattacaaagtcagtttcaggcaaaagctgccatggtagcgagtcttgaagctcagtatttacaacgtcagcaagattttagtcgccaacaaaagataaaaacagtagatggtattcaagccaagaaagatgcgtcagcagcttatctagataaatttcgtgaaaaagtagagctttatggcaaccgttattatccagaagaagcgaaacagcaacagttaaaaggtgaagttcgccttatggtaattttgaatgctcaagggggaattcgtgcaattcgtttgcttgaaagctcaggtcatccagttctagatgaagcagcaaaggcatcggtacggcgtggagcgccatttggccgttttgatgtaaatatgaaagatatttcagagcttcgtattattcgtacatggcgttttgatccagctgaagctgaatttgaagttcattaatgaaaaaatgtggataacttttaggatatccacatttttaaaatgtattaagaagctgactgcgttcttaatcgtgtgagagaatttgattattcctgatatgggttggcaatattgagtttagctaagatttcgatctctaaaccctccatttcttcagcatcttcatcacttgtttcatggtcataaccaagtaaatgtagaaccccatggactaaaagatgcgcaaaatgattttgtgcggttttcttttgttccagagcctcttgtaataccactggaatacaaattactaaatcacccaacggtaatgcgtcgagcattggtaaaacttcttcaggaatatcacttggaaaagatagaacgttagttggcttatctttctctcgatattgcaagttaagttgatggctttcttccaaatcaacacatgcgataccaatttcgcaatcttccttatagccaacgtggcgtaaagttgtctcaataatttttttgagttgagctcgtttgagctctaactcaggggattgaaagtcttgttgtaaacttaaactgattttcaaaatgaatccttaagcatcctgatgttgcaagtctgctgctgtatcgttttcagcaattaatgcttcttggcgtgctttacgttcagcacgtgcttcagcattaagacgctgttgttcaccatcccaaccctcataagcttcaacaattttttgaacaagttgatggcgtactacatcgcgggaatggaaacgggtaatatgaatttctttaatgttctcaagtacgcgaagggcgtgtgccaaaccagattgttggcctcgaggtaaatctacttgggtaatgtcacctgtaatcactgcacgagagccaaaacctaaacgggtcaagaacattttcatttgttctggtgtagtgttttgagcttcatccaaaatcacaaatgaatggttaagagtacgaccacgcatataagcaagtggtgcaacttcaatcacttgacgttcgattaacttggcgactttttcgaagcccagcatttcgtagagggcatcgtaaagaggacgtagatatgggtcgattttttgggttaaatcaccaggtaagaaaccgagcttttctcctgcctctaccgcagggcggacaagtaaaattcgctggatttcattacgttctaacatgtccactgcggcagcaactgctaaataagttttacctgtaccagcagggcctacaccaaaagaaatatcgctttgtaaaatacgttgtacatagcgtttttgattggcaccacgtggattaatgcgaccttttcgagtctggaaatagacatccatgggcgcatcatgctcatccatttcttcgccaactagttcgaagtttcgttcagtttgcgaagattgaatcaagaggtgtaacaggtcagcactgatttgttgggacgcctctgtttcttcgtagagtcgttgcaataacgcttcggctctcccaacagcatctatctcaccatctatgtaaaaaacatctccacgatgagtaattttgacatctaaacgctgttcaatttgcttaaggtgcccattataggcacccaagatgctctttaaacgttccattgaaatttcaggaaatgttacggtacgtcgaatcgctgcagtcaagagaaaacctttcagtagactttagaatacctctacattacgccacgtcaggctcaagattcaagagttcaccgtaaactaaatttaaagttttaatttcagtaatctcaatctctgcaaaacgaccaatccacgatgcatcgcctacaaaagtcactaaacgtgtattgtctgctgtacctactaaaatattagggtcttgatcagatactttttcaataagtacacgttcaattttgccaagcattgcgtcagttttttcaatgctagattgcttaatgacttgttgaacttgtgctaaacgttcttttttaacgtgttcaggggttgtatctggtaagtcagatgctggtgtacctgggcgttttgagtaaacaaagctataagaatgatcaaagtctaagtctttgataaattgcaatgtttctgcaaaattttcatctgtttcaccagggaaaccaatgataaaatcgctcgataaatgcatatcagggcgtattttgcgtaacttggcaatcttatcgatgtatacatcaatcgtgtgatttcgcttcattgctttgagtacatcattagatccactttgtactggcaaatgtaagtgtgaaaccatttgaggtaaatcttcataacactgaataagttcatcagagaactcaagtggatgtgaagttgtataacgtaaacggccaatacctggaatttctgcaacgagtcgtaacaattcagggaaggtacaaatgccgccttcgaatgtttcaccacgatatccgttcacattttgaccaagtaagctgatttcacggacacctttttcagcaagacctgcgatttctgcaagaacatcatcaagtggacgtgaaacttcttcaccacgagtgtatggaacaacacagaaagagcagtatttagagcaaccttccataatagaaacgaatgctttgaaaccttctacgcgtggttcaggtaagaagtcgaatttttcaatatcagggaatgaaatatcaacgagcttaattttttcttttttcggcttttccacttgtgcgtgatgttgatcaagcatttgcggtaaacggtgtaaggtttgtggaccaaaaatcatgtcgacataaggtgcacgtttttgaatattgtcaccctcttgagaagcaacacatccacccacaccaataacaagatcaggattttgttcttttaatttgcgccaacgacctaattcactaaatactttctcttgtgctttttcacgaatagagcaagtattcatgagcagaatgtctgcttcattagggttgttcgttaacacataaccatgagaatcccccaaaaggtctgccatacggtgactgtcatactcattcatctgacacccttgagtttcaatatatagtttctttattgaaacgtcagtggtgtgcgttggctgggtaacagtgttttctgaggcagctttggcaccattgggaatgaaggtttgaaccgtcatgcaggctcctaacagatcgatctagttaaataataaaatgacccaaaacgggtcaaaccaatcattatagcagtattttgagcagaacagataacaataaactcccataagctacacatgatttatggagacaaatgtcatgaattttaatgatgttgaatcagatagttacataacacaacaaaagaaagcatgaagaataattaaactatgcctaaaggtggatagtcaggatttaacgcatttatgagaccaggtaaaaagagctcatcaaacaagagtcgtgtgatgaaaaataaatatgcacatcgtagctggttaggagctgtgtgtttacttggttgttcattatcttatgccgcagaagaacaatttaacgatgcactaaatgccgccaatagtggtaatactgcattgttagatcaatatcagcttgcaatgcaaaatgatgtgttgggctactatcctgaatattggaaattaaacacaaatttaggctttcaatctccgacatcaattgtaagcttcgcacagcgctatccacagtctgctatggcagaaaagctggccgcggattatgtcgaagaaaaagttaaacaagctgactttgcgtctgcacaaccaatcttgccttatgtttcgaatcctgaccaggccgaaaattgtgctttagcgcaggtgagagctaaaagtggtgatgcattagtttttgctgaatataaagatgtatggttagccactgaatcgcaaccagaatcatgtattggactcggccgtatgatgctgtctagtccattaatgagtgcacaagacaagcagcagcgcctgtgggtacagttacgtgcaggtttatctggacaggcgcttgctacagcacagactttgggtttgaatttgtctttggctcagctcaatcagattcaggcgaatccactgaattacttatggtcagcaccaaaaaccaatgacgtagattacgcctatttgatttttgcactaggccgattagcaaataatgatttaggaaatgcttttgcaaatgtacagcgagtagcgcaaggtactccagagagcgtgcaaaagtatctctatcgaaccgtagcctatattggtggaactacggtaatgaagaacaactttaaccgtgaagtccttcaatattttgacgcaagttatggctatccgttaagtcctgaagaagctgaaatttatgcacgacaagctattcgttttagtgcatgggaaagtttaattcgtgcaattgatagtatgtcggtttcacaaaaacaagaagatcgctggcagtattggttagcgcgtgcgacagagcaacgtggcgatagtaattctaagaatacggcacaacgtatttataaaaaattagctgaaagtggggatgattatcacaaccttcttgcaaaagaccgtttaggcgtacgatataatcatcagccgtataatgatgagccaactgcaagtgatttacgccgtctagatcaaaatattcactttaatcgtgcatttactttaagacgaattaatgccaacccaacctatactaaccgagagtggaactgggctgttcgtcaagcatatctacagcatgatgatggattactattagcggcggcaaaacgtgctcatgatatgggatggtatgaccgcgcgatttatgcggcagatcgtacaacgaataaacataatgatacgtatcgttatgtgaccccgcataagaccaatgtcgtaagccatagttacaatgctggaattgatcctgcttgggcttatggtttaatgcgtcaagaaagccgatttgttacctcggcacgctctcatgtaggtgctggtggacttatgcaaattatgccggatacggcaaagttgattgctcgccagatgggagaaacatataatccggcagcgttaagtgaaatgaacaccaatattcgttatgggacattttatttatcgatgattcaagggcagttaagtaataaccctgttttagcaacggcaggttataatgctgggccgaatcgggcaagacgttggcaacctgattaccaaccgattgaggctgatcaatatacagaaaccattccattgcttgagaccagagattatgtcaagcatgtcatgacgaatgcgacgcattatggagtgatattaggtcaaggtgctcaatcattaatacaacgtatgaaagtcattccaacgcgatcatcaccttagttttagatgatgaatgatggaacattcttttaattggcataaccaagttttaattaaatgaaatatagagacctaggacttcaatcaatatcgcaacttgcatggtggatcatctgtgcaagcgttggtttgttgagttctgttttacatgcggaacctgttaacgtgcaaggttatgttatgcatgtacagatgacgcctgctgtttgtgcgttagatccttctaaacaaaagcagcgtaaatgtcttgaaggatattcgcttacgattactggtttaatgcctgaaaccaccagaactgactgttcaacacaaagctcagctacactgtcaccactgcaagctaaggtggtcgctcgggtgatgccagacaataatgctcgtgtgcaactctggagaagtgtgggtggctgtgtgcctatgaatgcaagtcaatatttccgtacgattattaactttgctgaacgtttaaaaatacctgctaatctaaccagctctactaatgtggaaatgcaacaatctacattacgtcaacaatttaccaagcttaatccaagcttacctcaaaatggtattcgcttcacttgtcagctctcacgctctgatgtcgtactaacagaagttaaagtctgttacacggtaaatggtcaatataagcaatgctcaaatcacgttgtctctaattgcccaagcgaaattactattaaaggcagttattaagagcaataaccatttcataaaaaaatgctgaccatacaatgaatctatttgtaaaggttaatttgtattttctatcagacttttggtgaaaatgagtcgcttttacatgcatctgccacttctttagagtacaatctttgccgtttatgatgatttggttaagtagaatcgctacttaacccgattaaggacactcattggagacaattacatgaagcaacccgttcgtgttgccgtgactggcgctgcaggtcaaattggttacagcttattattccgtatcgcaagcggtgaaatgctaggtaaagatcaacctgttattttacaattgcttgaagttccagttgaaaaagcacaacaagcgcttaaaggcgtaatgatggaacttgatgactgtgctttccctttattggctggcatgatcgggactgatgatcctaaagttgcatttaaagatgctgactatgcgttattggtaggttctcgtccacgtggtcctggtatggaacgtgctgacttgttaaaagttaacggcgaaatcttcattggccaaggtcaagcattaaacgaagttgctagccgtgacgttaaagtattagttgtaggtaaccctgcaaacacgaatgcttacattgcgatgaaatctgctccagatcttccagcgaaaaacttcacagcaatgttgcgtcttgaccacaaccgtgcgttgactcaagttgctcaaaaagctggtgttgctgtagctgacatcgaaaaattaacagtttggggtaaccactctccaactatgtatgctgactaccgttttgcaactgcaaatggtgaaagcttaaaagacaagatcaacgatccagcttggaacaaagacgtattccttccaactgttggtaaacgtggtgctgcgattatcgaagcgcgtggtttgtcttctgctgcttctgctgctaacgctgcaatcgaccatatgcgtgattgggcacttggtacgaacggcaagtgggtaactatgggtgttccttctgacggttcttatggtattcctgaaggcgttatgttcggtttccctgtaacaactgaaaacggtgaatacaaaatcgttcaaggtttagaaatcgatgaatttagccgtgagcgtatcaacttcactctaaacgagcttgaagaagaacgtgcagcaattgctgacatggtaaaataattcatcagtttgatgagttggaaagcactctcttgtagggtgcttttttatatgtgaaatttaataagaacacacaaaaaacaacaagaaaatataagcatagatatgcaactcacatctattgttgttagattattgaaaagaagccatgggagaataacaatgtttgaacaacaaccgacattacaacttttatttgagcaattgggtttagattctgatgatgcaagtattgaaaattttatcagaacgcatcaattgccggctgaacagaagttacatgaggcctctttctggtcccaaggccaaagtgattttttaaaaagtcattgggaaaaagatgatgagtggattgtagttattgatgagctgaatgagcaattacatgaagatagtgtgaaaaaataacaaatgaaaaaggcctgttatagttaacaggcctttttcattcataagttagtgagttcttaacttaattaaatttttataccatggttcatgacgtaccggattaaatataggatgttcatgaagcaactcaagatcacattgagcggttgataaatattttgtgagccaatgacgagttagtgcagactcttgctgtgctgctgacgcataagccaagaagaaatatatatcgccatgttgatgatgagctagaggtttcaaaatttgctgagcaatcagcgcaaagcgtttttccttatttaactcaaaataaagcatataagctttagctaaatgcagcgataggtttaaatacaaactcattggcatttcttcatattccatacgagcttgttccagcaaaacaatggcttcttgcaagaagtgaatttgttcttggcgaacacggcttaacgtaacgagctgcatacgtaattccgcacgctccaaagcaagctcgggcgtattctcagttaaatagagttggtctgtttcaccaattctggacacaatcgcttttgtttcaatagacatacgccttcgcctttttaatcaatatcttttatatcgggtccatttaagaaatttaaagagctttcttttaaacccaaattgagtttccgctacgaagccaagcagtaatagagaggcgctgctgtttagaaactaaaacctcatgaagcaaattgctctggaatataactaagcgattaggctctggtgtaataatgtgccaaatattgtttttatcttgtaagcgtaattggccaccccagtcatcttgccattcagggtgtaaataataaacggtagacataatacgatcatttttttgctgagggttatctcgatgtaatgcgtagaattcacccgggttataacaggcaaaatgtgcttctacttctttaatccctaaaaagaaagcttgatttagatgctggcaaaatgaagataatgtttctacatgctgctcagccacaggaagagattcgttaatccataaaatatgatcgcttcggatcgtactcaccacaccattttgaatacccgcttctcgaaactcatcaaagtggtggctacactctttggcaacttgagtatgatattcagcagaataagcttggttcacaattgcgaaaccatgagcatttaagtcatctaaaatctggtccagattccagcagtcaggaagcggttgagagtgcatataacctcatatcgatcgtaagaaaatcaagcagccttattttagatgatcacaaccttacgaaagaatatttttttcatgttaaactaatcgttgaattgaggaattaaagtcaacatgaattaccgtcaccatttccatgcgggcaactttgcagatgttatgaagcatgtgcttttgctacagcttctcaaccgtttaaatgctaaagataaaccttatcgttatatcgatacgcatggaggtgcaggaaaatatgatctatctcaggcacctgcacaaaagtcaggagaattcctaacaggtattcatcgtcttgtacagctttctgacatggaaaagcgccaagctcctgaagccatccagcaatacctaaaacttgtagaagaattacgtgctcaagaaggtaagggaagttatccgggctctccgtggtttgctttgcaaggtatgcgtgaaattgataaggctacaatatttgaaatgcagcgtgatgtatttcagcaattacgccataacattcatgataaacgtgcgggcttgcatgagcgtgatgcatatgaaggcttgcttgccgtaattccaccaaaggaaaagcgcggtttagtgatgattgatccgccttacgaattagagcgtaaggatttcccgcaattggttgaacttttacaaagcgcttataaaaaatggccaacaggtgtcttcgcggtttggtatccaattaaagatcgcgcaatgattgaacgttttgaaaagaaaatgtttaaaactggaattcgccgtcaattaatctgtgaaatttgtgtttggccagatgacacacctgtaggtttgaatggttgtggattattagtaattaacccaccttggcagttctccgaacaagcagatcaagccctacaatggttattccctcacttacgtatgcaagaaacaggtggtcatgccgctgtacgctggttagtgggtgagtaataattaatctaaatcaatgcacatgtttggaatagaaaataatgacaaatgcgcctaaaccagagcaagatttaactcataatgaacattcttttgatgggattacgttcgaagtggttgaagaagaagataatccggaaggacaaaaagtgaagcgcagaggtatttacctttggcctaacttaatcacgacagccgctttgttgtctggtttctattccattattgcaagtatgaatggcgaatttgctcaagcgatttatgccatttttcttgcagcattatttgatgggttagatggacgcgttgccagagctattggtgcccaaagtgcttttggtgagcaatatgactctttatcagatttgttagcatttggtgtagcgccagcaatgctaatgtatagctggagtctacatgacttaggccgtatcggtttggcatgctgttttgtttataccgcttgtgccgcgttccgtttagcacgatttaatgttcagattggagtggttgataagcgctattttattggtattgctagtccactcgccgcgattatcattatttcactcgtatgggtagctcgtgattatccgttcatttttgatttacgcgatattgctattcaaaccattaacgcggtcatcatggtggttgtaggactacttatgatttctaatattaaatattattcatttaagcaaatggatcgtaagcgtgttccttttgtagttatgttgccagtagtactgatttttgcagcaatcacttataatattccaatgggtattttgattgtatcaatcatctatgctctatcaggttttgttaccacacttttagctaaaaaaataacgagaccatcaaaacataaaattagatgaggttcggtatgcctaagttgataagtgaaaaaaatcaattacagcaactgagcctcaactcaaatgggggagttgtctatcagcccgccagaggtttttttaaagttgtctatcaaggtttaattcttcctaacctgcctgcaccacttcgttactttaattacattagtctaatcggtcagcctagaatccctctttgctataacgcaaatggtattgtgacttctgcagttgatacagcaactgtactggttagcaatagcttacatagtgtagggcacttaaaaacttattccattcgacgccaatgtcagcttaatcctagtcggtatcaattcgataaaactgatcttattgagtggcaaatcccaagagttcagcttagacgaatcgattctgaaatgagctgtgatttaatcgtccaaactccttccgacatttcgaattcatcagcattgcagtggggaatatctgactactggtctattttgtgccactgtgaaggtgagattttatataaaggacagaaatatgaggtcaatggattaggccgatttaaacatgctcgagccttacatttaccttttttatctttatgtttttatacctgtcaaattattaatttgaatgaaaccactcaagtcacactttctcaaataagaaatcagtggaatatcattctattttcacgtttagatattcaagaactaggaaagcagcccgtcacgtttacagaagatgttaatttccacatccaccgggtttatccaaaagttgaaacaccgcatgggcgagaaatgtatttaccacgagagttttcttggcaatgtaaaaaaaatggaaaagttatttttgaactctatggtgaaagtcgtggtgattacaaatttgggttagctgctggatacataggaagttttcgttatcaattaagttggaataatcaatgtcttcaaggagaaggtggatattgtgaatacattgattgccgacctttaagatggcaagaaaagaatcaaaacgaaaaaatgctcgataaattgctgcttttacaaccgtgtttatataaaaaatgaatatttttatcatttttgggtaaaaaacgaccgcttgatgtgagttgctagaaaaaggggttgcaaagggagagagatggtctataatgcacatccatcggcggtgatgtagatagaaacttgttgaaaaacagttacttgtgattaggttgattgctttaagtgatgaatttgatgatgagatggtttagagaataagttttaaaaatatttaaaattacctgttgacttttaagagattaagagtaatatagccgacctagcttgctggtgacgaaccagtaagaagatcattaagagaattgaagaacaacttgtgtggatttttactgattgattaatcgaaataattttcattgattgattggtttaaattactcgaagtttatttgagcgaaatttaagtcagtaattgatgagccagaattggcaccttgtctataaataaggtgcaaaatgattttaactgaagagtttgatcatggctcagattgaacgctggcggcaggcttaacacatgcaagtcgagcgggggaaggtagcttgctactggacctagcggcggacgggtgagtaatgcttaggaatctgcctattagtgggggacaacatctcgaaagggatgctaataccgcatacgtcctacgggagaaagcaggggatcttcggaccttgcgctaatagatgagcctaagtcggattagctagttggtggggtaaaggcctaccaaggcgacgatctgtagcgggtctgagaggatgatccgccacactgggactgagacacggcccagactcctacgggaggcagcagtggggaatattggacaatggggggaaccctgatccagccatgccgcgtgtgtgaagaaggccttatggttgtaaagcactttaagcgaggaggaggctactttagttaatacctagagatagtggacgttactcgcagaataagcaccggctaactctgtgccagcagccgcggtaatacagagggtgcgagcgttaatcggatttactgggcgtaaagcgtgcgtaggcggcttattaagtcggatgtgaaatccccgagcttaacttgggaattgcattcgatactggtgagctagagtatgggagaggatggtagaattccaggtgtagcggtgaaatgcgtagagatctggaggaataccgatggcgaaggcagccatctggcctaatactgacgctgaggtacgaaagcatggggagcaaacaggattagataccctggtagtccatgccgtaaacgatgtctactagccgttggggcctttgaggctttagtggcgcagctaacgcgataagtagaccgcctggggagtacggtcgcaagactaaaactcaaatgaattgacgggggcccgcacaagcggtggagcatgtggtttaattcgatgcaacgcgaagaaccttacctggccttgacatactagaaactttccagagatggattggtgccttcgggaatctagatacaggtgctgcatggctgtcgtcagctcgtgtcgtgagatgttgggttaagtcccgcaacgagcgcaacccttttccttacttgccagcatttcggatgggaactttaaggatactgccagtgacaaactggaggaaggcggggacgacgtcaagtcatcatggcccttacggccagggctacacacgtgctacaatggtcggtacaaagggttgctacacagcgatgtgatgctaatctcaaaaagccgatcgtagtccggattggagtctgcaactcgactccatgaagtcggaatcgctagtaatcgcggatcagaatgccgcggtgaatacgttcccgggccttgtacacaccgcccgtcacaccatgggagtttgttgcaccagaagtagctagcctaactgcaaagagggcggttaccacggtgtggccgatgactggggtgaagtcgtaacaaggtagccgtaggggaacctgcggctggatcacctccttaacgaaagattgacgattggtaagaatccacaacaagttgttcttcatagatgtatctgagggtctgtagctcagttggttagagcacacgcttgataagcgtggggtcacaagttcaagtcttgtcagacccaccatgactttgactggttgaagttatagataaaagatacatgattgatgatgtaagctggggacttagcttagttggtagagcgcctgctttgcacgcaggaggtcaggagttcgactctcctagtctccaccagaacttaagataagttcggattacagaaattagtaaataaagattaagatcttggtttattaacttctgtgatttcattatcacggtaattagtgtgatctgacgaagacacattaactcattaacagattggcaaaattgagtctgaaataaattgttcactcaagagtttaggttaagcaattaatctagatgaattgagaactagcaaattaactgaatcaagcgttttggtatgtgaatttagattgaagctgtacagtgcttaagtgcacagtgctctaaactgaaatgttgaagttactaacttgtaggtaacatcgactgtttggggttgtatagtcaagtaattaagtgcatgtggtggatgccttggcagtcagaggcgatgaaagacgtgatagcctgcgaaaagctccggggaggcggcaaatatcctttgatccggagatgtctgaatgggggaacccacctactttaaggtaggtattgcaacatgaatacatagtgttgcaaggcgaacgaggggaagtgaaacatctcagtacccttaggaaaagaaatcaattgagattccctcagtagcggcgagcgaacggggatcagcccattaagttatgtgtgttttagtggaacgctctgggaagtgcgaacgtagagggtgatattcccgtacacgaaagggcacacataatgatgacgagtagggcgaggcacgtgaaaccttgtctgaatatggggggaccatcctccaaggctaaatactcctgactgaccgatagtgaaccagtaccgtgagggaaaggcgaaaagaacccctgtgaggggagtgaaatagatcctgaaaccgcatgcatacaagcagtgggagcaccttcgtggtgtgactgcgtaccttttgtataatgggtcagcgacttatattcagtagcgaggttaaccgtataggggagccgtagagaaatcgagtcttaatagggcgtttagttgctgggtatagacccgaaaccaggcgatctatccatgagcaggttgaaggttgggtaacactaactggaggaccgaacccactgtcgttgaaaagccaggggatgacttgtggataggggtgaaaggctaatcaagcctggtgatagctggttctccccgaaagctatttaggtagcgcctcggacgaataccatagggggtagagcactgtttcggctagggggtcatcccgacttaccaaaccgatgcaaactccgaatacctatgagtactatccgggagacagactgcgggtgctaacgtccgtagtcaagaggaaaacaatccagaccgccagctaaggccccaaaatcatagttaagtgggaaacgatgtgggaaggcatagacagctaggaggttggcttagaagcagccaccctttaaagaaagcgtaatagctcactagtcgagtcggcctgcgcggaagatgtaacggggctaaaactatgtgccgaagctgcggatgtatactttgtatacgtggtaggggagcgttctgtaagccgatgaaggtgtgttgagaagcatgctggaggtatcagaagtgcgaatgctgacgtgagtaacgacaaaacgggtgaaaaacccgttcgccgaaagaccaagggttccagtccaacgttaatcggggctgggtgagtcgacccctaaggcgaggccgaaaggcgtagtcgatgggaaaatggttaatattccattacttctgtgtaatgcgatgagaggacggagaaggctaaatcagcctggcgttggttgtccaggtgaaaggatgtaggcatgtatcttaggcaaatccggggtactctatgctgagatctgatagcaagctgtacttgtacagcgaagtggttgatgccatgcttccaggaaaagtctctaagcttcagttacacaggaatcgtacccgaaaccgacacaggtggtcaggtcgagtagaccaaggcgcttgagagaactctgctgaaggaactaggcaaaatggtaccgtaacttcgggagaaggtacgctgttgttggtgatggaactcgcttcctgagctgacgacagccgcagaaaccaggccgctgcaactgtttattaaaaacatagcactctgcaaacacgaaagtggacgtatagggtgtgatgcctgcccggtgctggaaggttaattgatggggttagcgtaagcgaagctcttgatcgaagccccagtaaacggcggccgtaactataacggtcctaaggtagcgaaattccttgtcgggtaagttccgacctgcacgaatggcataatgatggcggcgctgtctccagcagaggctcagtgaaatcgaaatcgctgtgaagatgcagtgtacccgcggctagacggaaagaccccgtgaacctttactgcagcttgacactgaactttgaccttacttgtgtaggataggtgggaggctttgaagctggaacgctagttccagtggagccgtccttgaaataccaccctggtaatgttgaggttctaactctgtcccgtgatccgggacgaggaccgtgtctggtgggtagtttgactggggcggtctcctcctaaagagtaacggaggagtacgaaggtgcgctcagcgtggtcggaaatcacgcgtagagtataaaggcaaaagcgcgcttaactgcgagacccacaagtcgagcaggtacgaaagtaggtcttagtgatccggtggttctgtatggaagggccatcgctcaacggataaaaggtactctggggataacaggctgataccgcccaagagttcatatcgacggcggtgtttggcacctcgatgtcggctcatctcatcctggggctgaagcaggtcccaagggtatggctgttcgccatttaaagaggtacgcgagctgggtttagaacgtcgtgagacagttcggtccctatctaccgtgggcgctggaaatttgagaggatctgctcctagtacgagaggaccagagtggacgaacctctggtgtaccggttgtgacgccagtcgcatcgccgggtagctatgttcggaagggataaccgctgaaagcatctaagcgggaagcctacctcaagataagatttccctaggactttatgtcctctaaagagccgttcgagactaggacgttgataggttggatgtggaagcatagtgatatgtgaagctgaccaatactaattgctcgtgaggcttgactatacaacacccaagcagttgtatatgaagcatcaatcgattcttaagtatgcaagacaacttgatttagttatacctctagctaaaatgaacagataaagtaagattcaattcagcccagtctgttacagatttggaaaacgcttcggcattaaataagacctaagcaagtatccataaacagttgtgctggcgaccatagcaagagtgaaccacctgatcccttcccgaactcagaagtgaaacctcttagcgctgatggtagtgtgggattacccatgtgagagtaagtcatcgccagctcattattctaaacaccccaatctcaaaagaggttggggtgtttttttatagcaagaaatcaatcaatttttatagctggaatttgtatcctcaatcctttaaactttaaaattgattcaaattataaagaaataaagctaatctaaagttatttacctcatcaaaaatttaatatgcaatggatcgtagttaaaactttctcgtttccttatgaggcacaaattgcaaaaactcaattagaagcatttggaattcctgcttatattgaaaatgagcatacaattaatatggattggttttattctaatgctttaggtggagttcgtttattagttccagaaaactatgttgatgaagcgaagttatttcttgaaaaagactttagtgatgagcttgaacaaaagttcggggagaataaagaatattgtcctgagtgtggaagtttggatatagaggttaatactaaaggaaaaaaatctgcctttttagtgtttatgtttttcggcctacctttattttcttttaaaaatgggagtaaatgtaagcgttgtggacacttttggaattaaatatatagtaaaggattatttattatcttaattatgaaccctcatgtagagagattggattgagttctatctctgcaattaatgtttgaggcagagaagccctcgatattaaacaaagaaaataaattattttgatgggcgttctgtttaataactataaggtgtattcaatgatgactaaaaaacaattgacttcaaaacaaatagatatgttgcttgaattattaaaaaatagatttgaaaagaatatacatcgacataaagaaattgattggacgaatgtgcgagctaaacttattgagtctccagataaactatggacattgcaagaaatggagaatactgggggagagccagacgttgtagcgtataacaagcaaaaagatgaatatttattcgtcgattgttctgctgaaacccctcaaggtcgtagaagcctttgctatgaccgagaagccttagagtctagaaaagatcatcctcctaaaaatagcgcaatagacttagtccaagaaataggggctgaactcctaacagaagagcaatatcaccaattacaacagctcggggagtttgatctaaaaacatcaagctggcttgctactccagaggaaattcgaaaattaggaggagctctttttgcggaccgtcgctatggtcgagtcttcatctatcacaatggagcccagtcatattatgcagctcgtggttttcgctgctgtttaagggtataggtcttgcgaatcaactcgatcgtctggatttgatattttatgccaagaaaatggagattcttgcaacttttgactgatggtaaacatgacaagatatgttctggaattaaataaaaacatcaggacatttctaaaaatgcagctcaatccaatttactataatgaacaacatatagcttttgccgataatgttcgtagatttgtacaaaaagaaatgacacctttcgttaatgaatgggatgaggctgagacattcccaagagaactttataaaaaggctgccgaaattggattattgggtctaggtttttcagaagaatatggtggtattccagatgcagatccattctattcattactggctggtatcgaaatggcaaaggcgggttcaggtggggtgcatatctcgctcatggtccataccattggcgcccctcccattcagcactttgggagtgaggagttaaaggctagagttctgccaggtattatttccggtgagaaaatttcggctttagcgattacagaacctggtggcggttcagatgttgctgcattacagactaaagctgtcagagatggggattattatattgtttcgggcgagaaaacatttattacatcgggaattcgtgcagactattatacagttgcagtgcgtactgatccgacaaaaacgggtgcagaaggcatttcaatgttactcattgatgcacatagtgaaggtattactaaaacgcctttgaagaaaatgggatggtgggcatcagatacggcacatttgcattttgatcaagtacgagtacctgcatcaaatctacttggcaaagaaaatgccggttttaaagttattatgaataactttaatatggagcggtttttcttgggagtagtcgcttatgggtatgcattagtctgttatgaagaagctttagagtgggcacagcaacgtaaaacttttggtaagcgattaatagatcatcaagtagtacgccataaattggtagatatggcaacccaactgacctcaacgcgggcattacttgaagaaacagcatggaaaatgactcagccgaagttacaaggacctgagttggtggtgcaaatttcaatgcttaaaaatgttgcgactcgcactatgcaattttgtgctgatgcggctgtacaaacattaggtggtatgggctttatgcgaggtaccaagtcagaacgtatttaccgtgaagtgaaggtcaatatgattggcggtggtgctgaagaaattatgaaagatttgattagtaaacagcttggttattaattcttataaggtggactttgagccaccttttttatttcaaagccatttcccaaaccatttccgttaactcatcaattttgactttaccctcagatttataccaagttacagtccatgaaattgcaccgccaattaagcgtcgccaaataaaagcatcgtgtttgactttaccttgtgtgcgtaacttttcaatgatatcgagccagatttgctcatattcattacgcatttttaaaagataatcttgcttttcttttgatagagcgaaccattcgtacaccaacacagccatggctgcaccagtatctccagtaattgagatcagttcggctttaataagagcacgtaattgttgttctgggtctgtagattgagttgctgcatcatttaaacgggcaagattatagataatggtctgttccatcacatgagcgaggatatcatctttacttttgaaatgatgaaataagcttcccgattggattccaataaactgagcaagttcacgaacagtggttttatcatagccttgcttatgaaaaagataggcagcaccgtgcaataaacggccacgtggactgtcatcaaagcaggggatatttggaatctgttcaattgaggtggcaatcatgtgctcagtttgttcctttatctaaaagtctatagtggaaattttcactaaatttcattgcatttcaggttatttgctgaatttggaagatttggtcaacatcacaataacattttgcgctttacaaaccaagcgcttgcttggtaatgttgaggctgatttttagacaaaataatgagaaatagaatggcaaataatcagcaggatgatcatcgagtcgtaaaaataggttgtgcctctgggttttggggagataccaatactgccgcttttcagttagtgcatttgaccgatattaattatttggtttttgattatttgtccgagattaccatgtcgattatggcaaaagcgaagatggtagaaccgaaacatggttacgctttagattttgtcagccgagtcatggcacccttactaaaaaaaattgctgaaaaaaagattaaagtgattagtaatgcgggtggtgttaatccattggcttgtcgggacgcattgcaaaaaattattaaagagtatggtctagatctgaaagtggctgtggtgttaggtgatgatcttttgccaaaacatgagcagctaaaatcacagaatattcaagaaatgtttagcggagaagcgttgccagaacaggtggcaagcagtaatgcttatttaggcgcggttgctattcgtgacgccttagacttaggtgcagatattgtgattacgggtcgtgtagttgactctgctgtggtacttgcacccttacttcatgaatatcagtggcctttagatgactatgacaaattggcacaaggttcgttggcaggtcatgtaattgaatgtggagcccaatgtacgggtggtaattttaccgattggcaattggtacagggcttcgacaacatgggctttccagtggttgaagtgagtgaagatggctcatttgttgtaactaagcctcaaggtacaggtggtctggtttctactgctacagttgcagagcaaattgtttatgaaataggcaatcctcaagcatatttactacccgatgtcattgctgatttcagccacgtgcatttagagcaagtcggggaacaccgagttcgtgtgacgggtgcaaaaggacaagcaccaactacacaatataaagtcagcgcgacttacccagatggatatcgggttttagtgagtttcctcattgcaggacgtgaggcaccacaaaaagcacaagtcattgctgatgcgattttgactaagtgcgaacgtgttttagcaatgcgctcagtgccgccatttagtgaaaagtctgttgaaattttaggtattgaaagtacctatggcgaccatgcccaaacattaaatagtcgtgaagttgtggtcaaaatagctgtaaaacacatgtttaaagaagcatgtatgttctttgcatctgaaattgcacaagcttcaacaggtatggctccagccttggcaggaattgttggaggccgacccaaagcatctccagtgatcaaattattttcatttttaattgataaaaatcaggtgaatgttgaaatcgattttgatggccaacgtcacgcggttgaaattccacaaggggtttctacagagcaattgcttacattgacggcaggtgaaaatgcagtttatcaaggagatgaaattgaagttcccttgattgaaattgcgcatgcccgcagtggtgataaaggcaatcatagcaatattggcgtgattgcacgtaaagcagactatttaccatggattcgtgcagcactaactgaacagtctgttgcaagctatatgcaacatgtcttggatgctgagaaagggcgagtaatccgttatgagttaccgggtttaaatgcactgaattttatgttggagaatgccttaggcggtggtggtgttgccagcttacgtattgatccgcaaggtaaagcttttgcccaacagttattggatatgcctgttaaagttccggcacatcttttagaaaaataaaatgaatggatgaaacaaagatgagttatcaatcaatatttagaccagatgctttcgccaataaagtcattattgtaacaggtggcggctccggaattgggcgctgtactgcacatgagcttgcagcccttggcgctcaagtagtgattacaggacgcaaaattgaaaaattagagaaagtaagccaagaaataatagaagatggtggtttagttcatttcattgtttgtgataaccgtgaagaagaacaagtgaaaaatatgattgccgaagtgattgagaaattcggcaaactcgatggtttggtaaataatgcaggcgggcagtttccctcagctttagagaatatttcggcgaatggtttcgatgcagtcgtgcgtaataatttacacgcaactttctatttaatgcgtgaagcttataaccaatggatggttaaacatggtggcagtattgtcaatatgactgctgatatgtggggcggcatgccgggaatgggacattctggtgctgcgcgttcaggggttgataacttaactaaaacagcatcggttgagtggggcaaatctggtgttcgtgtaaatgcggttgcaccggggtggattgtatcatccggtatggataattatagcggtgattttgccaaagtgattattccaagccttgctggaaatgttccattaaaacgtatgggaacagagtctgaagtttcatcggcgatttgttatttactctcggatgccgcagcttttgtgtccggtgtaactttgcgtattgatggtgctgcatcgcaagggacacgcatgtatccactgggtgaggcgacaaatagtgaatcttataatggtttccatcgcgcgtttattcctgaaatctttcagaaaaagactgaggctgaggaggagtaacaatgacaattcttccatcagagatcgctgttggtagtgaacagtatcaaaggaacaaagaggctttacttgcccagttaagtgaagtccgcgctattcaacaaaaaagcattgataaatcttatgctgccaaagcgaagtttgacaagaaaggcaagattttaccgcatgagcgtgtacggttattgctcgatgctgattcgccttttatcgaactatgcggtttggttggctacaacatgcatgatgataaagatggctccgaagctggtggtggcgtaattgctggcattggttttgtcagtggtgtgcgctgcttggtctcagccagtaatagtgcaatcaagggcggtaccatgtcacctatgggtgtacagaaaaccttgcgcttgcaaaaaattgctttagaacaaaaacttccaatgattacgctgacggaaagtggcggcgccaacttaaattatgctgcagaagtatttacctatggtggtatgacctttgccaatcaggcacgtttgtctgcggcaggtattccacaacttgcagtggtacatgggaatgcaacggcaggaggagcttatcaaccaggtctttcggactatgtgattgctgtacgtaaacagactgaaatgttacttgcaggcccacctttacttctggctgccacgggtgaagtcgccacagcggaggaattgggtggggctgaaatgcatgcacaggttgctggaacagcagaatacttagcagaaaatgatgccgatgggattcgacttgcgcgtgaaatttttgaacacctgaactggaaagagcaaaacaaaccagttgatgtgacttataaagagcctcgttacgataccgaggaactgttgggtgttattccaagtgatcctaaacaaccatttgatatgaaagaagtggttgcccgcattattgacgattcagattttctagaatttaagctggaatatgatgatttaacggtatgtggctgggcaaaaattggtggtttgcatatcggtattattaccaataatggtccgattacccctcaaggagcagcgaaagcagctcagtttattcacttatgtgaacagaccaaccgtccgttattattcttacataacactactggctttatggtgggaaccgatgccgagcaaaatggcattattaagcatggctcaaaactgattcaagcggttgccaattgtactgtacctaaaatttcaatcgttgtggcagggtcatatggtgctggtaactacgcaatgtgtggtcggagtttatcgccagattttatttttgcttggccgaactcgcatgttgctgtaatgggggctgcacaggccggaaaggtgctacgcattgtggctgaaggaaaacaaaaagcttccggtcaggaaccgaatccgcaaatgctcgattttcttgagcaaagtacggccatgaaattagagcagcaatctaccgcgcttttcaatacggccatgctacatgacgacggcattattgacccgcgagatacccgaaaattacttattttccttttacaaaccatttatgaagcacagcaacgcgaactaaatccgacccgttttggtgtgtctcgtttttaatcaatctttaccgtaattaaaaaaattaataggaacaacaccatgaaatttactgccgaacatgaagcattacgtcgcacagcgcgtcaatttgttgaaaatgaactgaatccgaatattccagaatgggaagaagctggacgtttcccgatccacgatgtatttaaaaagatgggtgatcttggcctattggggatttgtaagcctgaggaaaatggtggtctggctttagattactcttataacttggttgtggctgaagaaattggacgcgcagcttgcggtggtgtgcctttagccattggtgtacaaaccgatatggcaacacctgctttggcgcgttttggtagcaaagaattacgtgatgagtttttaacaccagccattgctggagaatatgttgcctcaattgcagtatcagaagtgcatgctggttcggatgttgctgctattaaaacgactgctaaaaaagatggcgatgactatgtcattaacggcagcaagatgtggattaccaactcactgcaggctgatttcttctgcctattggccaacacatctgacgataaacctcacgtcaacaagtcgatgattattgtgccagcaaaaactaaagggattagtttttcagaaccgttaaataaattaggcatgcgttcaacgaccacagcacaagtttatttggacaatgtacgtgtacctcagcgtaatttggttggcgttgaaggtatgggcttcatgatgcagatgatgcaatttcaggaagagcgtttatgggcttgtgctaatgcgattggtggtttggaaaatttaattcaaaagactatcgcctataccaaagagcgtacgacgtttggtcaaccactcattaataaccaatatatccattttcgttttgccgaactcatgactgaagtagaagcgcttaaagctttaacctaccaagcgtgtgaacagcatattgcgggtgaagatgtgactaagctggcatctatggcaaagctcaaagcaggccgtttaagccgtgaagttgccgatagctgcttgcaatattggggcggcaatggctttatgtgggataaccctgcatcccagctatatcgtgatggtcgtttaggctctattgggggtggcgcagatgagattatgttagggattatctgtaagttgatggatatcttgccaaaaaaacaaaaataaggaatcagccatgacactttcagcatcgcttcaagctttagatattgatgacagtattcaattagaacaagacggcagtattttatatctttggttaaaccgaccggagagccgtaatgccatgaacttgaatatggtcaatgcgattcaacaagtttttactgccattcgcaatgatctttcaattcgtgcagtcatcattcgtggtgaaggtgggactttctgcgcaggtggtgatattaaggacatggctgctttacgcgttgaatcaactaacattggtagtctacaaccttatactgactttaaccgccgttttggtgccatgcttgagcaagttgaagctgcaccacagactgttgtggtcattttagaaggtgcggtgttaggtggaggttttgggctggcctgtgtttctgatgttgccattagccgtgataatgcgcagtttggtttacctgaaactgggcttggtgtgattcctgctcaaattgctccttttgtggtgaaacgtattggcctgactcaggcacgcagactggctttactcggcatgcgttttgaagggcataccgcactgagtgtcggtgtggttcatcaaattgcacataatgaaattgaacttgaacaagctttacaggaaaccattcaacacattaaacgagcagctcctcaagcttcacgtgtgactaaagcactgttacatcgaacactcaatgaacctttaaatgagttgctagatgatgctgcacagcagtttgctcaagcggttggtggtgctgaaggacaagaaggaacgatggcttttatccagaaaaggttaccaaattgggccgatggatcataaaagataaggataaaaataatgaaattttcaaaaatactggttgccaatcgtggtgaaattgcagttcgagttatgcaaacagccaaggcaatgggttaccaaaccttcgcagtttattccgatgcagaccgtaatgctcgccatgtgcaagaggctgatgaagctgtttatattggtgcttcaaaagtatcggagtcttatctctccatcgctaaaattattgaagcttgcaaaaaaacaggggcggatgcagttcaccccggctatggttttttgtcagaaaatactgattttgctcaggcatgtatcgacaaccagattacatttattgggcctaccgcttctgcaattgagttaatgggcagtaaacgcctttcaaaaatcgccatgattgaggcaggcgtcccttgtgtgccggggtatgaaggtgaccgacaagatctcgaatatttagcaactcaagctgagcagattggttttccaattatggtcaaagcttctgcaggtggcggcggtcgtggcatgcgtttggtacagcaagcatccgagttgtttgaggcattacaaaccgcacgttcagaagctgaaaatgcttttggttctggtgagctcattttagaaaaagcagttattgctccacgccatgtcgaaattcaggtttttggtgatacacatggtaattatgtgtatttgtttgagcgcgattgttcaatccagcgccgtcatcagaaggttgttgaagaagctccctgtccggtgatgacgcctgaactgcgtcagaaaatgggtgaggcagccgtagcagcggcaaaagcatgtgcttatgtcggggcaggtacagttgagtttttgctagatgcatcgggtgcattttactttttggagatgaatacccgtttgcaggtagaacatccggtcactgagcttattacagggttagatttagttgaatggcagttacgtgtggcgaatggtgagcagttacctttaaagcaacaggaattgaccttaaatggtcatgcgatcgaagtgcgtttgtatgcagaagaccctcgtcaggactttttgccacaaacaggacaaattttacgttggaagcctgcagctttgccaaatgtgcgaatcgatcatggcatgttagcaactgatgaagttagtccattttacgatccgatggtagcaaaggtgattgcctatgggaaaacccgtgaggatgcgattcgcttactggctcgtgcagtcgatgatagtgttttacttggagtgaatagtaataaacagttcttggtcaatttactgcgccatccagttgttgttacaggggataccaatactgcattcatccaacagcatttccaaaatgatcccagcttacaccatcaggttttatctttagaaaccttagcaattgctgcggcattatttagccaaagtaaaggtactgcagtgtggcaaactgggcttggtgtgccattaccgttaaaattacaaactgccgatcagcaaattcaattgcagctttcatctgtaaataacatattcacggtacagttctgtgatcaaacagttgttattgatgtgcttgagaaaacgccagagcaactagtttacttaattgatggtgtacgtcgccgtgttcaatatgtattggatgatgatcagctttatctagatcgagataatggcaatgttttgatacgcaatatgacttacgctgcaccagaagctaccgatgtagcgggagatggcaaaattcgagcaccgatggatggggctgtagtgaatatcctggtcaatgaaggcgatcaagtagtgaagggccaaacattattgattcttgaagccatgaaaattcagcaacagattaaatctgatgtggatggtgtagtcgctgaaattttaggtcagcaaggtcaacaagtgaaaaaacggcaaatgctgtttagtatccaaatttaagagaagagcaattgtggttactggtaatcactattgatttatagaagatgattatttaaatcaaaaaagggaacatacgttccctttaattataaaaaaaaattatacaagctgtgtatacatacaatagagatagcctaaaatagctaaagcaacaagaggagcgataacttttgaccatgcaggaataaaagtttcgataggttgctcttcaacatgtaaatcttcatgatgtggttgggcttggtgaaccatttggttgaactccttcattgttgcatccaatgatagctcttcttgttcaacaggtttagaaccaatgagctctgttagatggtttgttgaccaaacccaatcttcagcttggccagataaatgttcaacttgccctaaaatgagctcttttaaaccactttggccgaaaccaccagtctcatcaagttgattaagttctgttaactgtaatgccagaatctcagaaatactttgctcaagttcagaattttttaaaactgacttattgtgttttgacgtagttagatgacgtgcaacttcttgaatatacaatggatcggcagttttgatttcatgataaattttattgtcgtcctgacgccataagctgattaatttaccaagcgtcaatatattcacttcgtcaatcagcttatttttctcattggctggatattgatttaaaagctgaggcttttgaatttttatttgctcagcaaagtattggactaaatcaaatgccatactttattcctctaaaattaatctaaaattcttaatgttggctttttcttggttggttcagatgtttcttgtgtttctgagtctaacttatcttctacaggcgctacattggcatattcttcagggtcaaagaataaaccttgtccattttcacgtgcataaatacctaaaactgcttgaataggtacgtaaatatctttggaaacgccgccaaaacgtgctgaaaatgtaatcgcatcattgctaatgagtagttgatgtaccgcatgaggcacaatgtttaaaacaatttgtccatctttcacaaactgttgtggtacatcagtgtgcggttgtgttgcatcaacgagtaaataaggtgtgagttgattgtcacaaatccattcatagattgcacgagcaagataaggacgtgtaggggttaattcaatagtttgctcagacatatcacactattccatatttaatagttcattgtaacgggttttctcttggggcgtcattgatttaacaaaagaagggcggttaaagatacgtttacaatacaaaaatataggtcgacactgctgctttggtaaatcaattcccatgctattaagcctcacaaaaattggagcaagcatacagtccagaattgaaaaattttcggacataaaataagggaaatgctgaaataaaggggtaagtgatattaaggtatcacgcaattctttttgtgctttttgtttttgttctacatttaacgtatctgcatgtctgagcatatgatcggccaacttaaaccaatcattttcaagacgccaaatatattggcgttgctctgcacgtgccataggggcatcggcatatagtttattctgacgatatcggtcatcgagatactcagcaataataggtgctgaaaataatttaagattttgctcaaccagcattggcaattgattataaggatttaagcttgccagatcttcatcttcgtgatcagttacgattaattgatatttaatttgtttttctgccaataaaaaacggatccagtgtgaacggaaatcatcagcatggctgtaaagggtaattccctgaattgaggtgttttcgaccgacatatcacaaggtatggttgtgtgaatcggttagaatactaaaaatatgcgaggaaatcacggtgacaaagatagagtttcatatatttatctgtttcactcatctacaaaatgaataagcaataaaaaagccttgggaaaaccaaggctttttgtccgattcggtaaacgaattaacgtttagagaattgaggacgtttacgagctttacgtaaaccaagtttcttacgttcaacttcacgagcatcacgagtaacgaaaccagcttgacgaagaacaggttttaaagtttcgtcagcagcgataagtgcacgagtaataccgtgacggatcgcaccagcttgaccaccgataccaccacctttaacagtgatgtaaaggtcatatttttcagtagcttctaaaagctctaaaggttgacgaacaaccatacgagcagtttcacgaccgaaatattgctctaaagtacggttgttaataacgagtttacctgtaccagctgacaagaaaacacgtgcagttgcggtcttacggcgacctgtaccataattagtagccatgtgctgtatcccttagatgtccaaaacttgtggctgttgagcagcgtgtggatgctcgctaccagcgtacactttcatcttcttgatcattgcataaccaagaggaccttttggcaacatgcctttaacagcacgttcaaagatttcttcaggtttgtgagcaactaatttttcgaaattagtttcttttaaaccgcctgggaattcagtgtggcgatagtatttcttgtcaagcgctttgttaccagtcacttgaacttgttcagcattgataacgatgatgtagtcaccagtgtcaacgtgaggagtataagaagttttgtgcttaccgcgtaaacgacgtgcaatttcagtcgctaaacgaccaagagttttacctgtagcatcaacaacgaaccaatcgtgttgtacttcagcaggctttgcgctgagagttttcattcaaacactacctattatagttggtttgagctagacatcgctcaaacaaaaaggagacgagattctaaacgagtttgttgtcaatcacaagaaaaatcccatataagctacataattttatccctaatccgatgaatgtaggatatgttaaaataattcaaattttagagatgtgtcgggggtgattgtgctgcctttatatgtcacttccggtgaacctgccggtattggtccagatatttgtttgagtctggcaaaacgggttgatgaacgtcctgttgtggttttggctgatcgaaatctattacaacaacgcgctcaaaagcttggtctggacattaaatttttagagtatagcggacaagctgaatcgtctttgcaaggcgagctttatatagaacatgtacccctagaaactatagtcgttgatggacagcttaatgctgctaatgccgcttatgtattagagcaattacgtcgctcagctgattatgctatgtctggtaagagcgtcggtgtagccactgctcctgttcaaaagtcggtgattaatgatgcagggattttatttagtggacatactgaatattatcaagaatttgcaggtgtagagcgtgttgttatgatgctggcaacgaaaacgttgcgggtggctctggcgaccactcatttaccattaagagatgttgcagatgcaattaccaaagaacgcttgcatcaagtgattgatattttacttcacgacttaaagaccaaatttaaaattaatgatcctcgagtcttagtatgtgggttaaatcctcatgcaggcgaagatggttatttgggacgtgaagagattgatacggtcaatccggtacttgaaagctaccgatcacagggagttaaattaagtttaagtttgccagctgatactttatttacgcccgaacatcttaaaaatgctgacgctgttcttgcgatgtaccatgatcaaggcttacctgtgttaaaatcacaaggttttggtgaagccatcaatatcacattgggcttaccatttattcgaacttcggtcgatcatggtactgctctgtctttagctgggacaggattggcaaaaagctcaagtttaaatgtcgctgtcgatttagctttatctttggcagcgagttaaatttttcatgttggaaatgttctatgtatcaaattaatgccctaaacccgaaagatgaagggcataaagctcgtaaacgttttggtcaaaacttcttacatgatcaacgagtcattgccaaaattgtacgctcagtcaatccgcgtacgggtgataatatcgtcgaaattggtccaggtttagctgctttaacttctcctctaattggagaatgtgatgcattaactgtagttgaattagaccgtgatttagctgctggcttacctgaacgcgtgccacatccagaacgtttaactatcgtagaagctgatgcattaaaatatgattttagtcagcttgtaaaagatgggcgtccattacgcgttgtcggcaatttgccttataacatttctacaccattactttttcatctcttggaatttggtagccaagttaaagacatgcacttcatgttgcaaaaagaagtggtagaacgtattactgctgaaccgaatacaaaagaatatggccgtttatcagtcatgatccaatattattgtcagcctacctttttatttgaagttccagcaggcgcatttaacccgccaccaaaagtgacaagtgcagtatttcgcttggttccttacgaacaaaaaccaattacggcgaaagatgaaaaagctttagctcgcttggttgcccacgtctttactcagcgccgtaaaacgctaagaaacagtcttaaaggcatgttggcagaggatggtttcgagaaagcaggagtcgacccaatggctcgtccagaaacgttaactcttgcagagtttgtggctttggcagatcaaatggtggcataaatgactaagcgctataactatgtaattggagatgtgcaaggttgttttgaggcactcaaagcgctattaaaagaaatacgttttgaccctgatcaagattttatctggtttgctggtgacttggttgcacgtggtgaaaactctgtaggtgctctacgttttattaaaaaactagctgatcgaggggctgctgctaccgtattgggtaaccatgatttaaccctgattgccggtgctcgtggtcttaaggaaattaaagaaaaagatcgcacgcaggatgttattgacgccgtggatggtgatgatcttatcgattggttacgtaaacagccgttatgtttatttccaaatgaacaaacaatactgacgcacgcaggtgtaccttgtatttgggatgcacaaaaaactgctgcattggcaaaagaagttgaggctgtattggcgcatgatgatttatctgtgctagatgcatttttagctgaaatgtatggttcaaaacccgatctttggacagatgatttgacaggtaatgaacgtttacgctgtattaccaattacttaactcgtatgcgtttaactaatgcagaaggggctttggagtttagttttaaagatactttagatgcaccaatgccagaaggttatttaccgtggtttgaatttccaagtaaggctgcacaaacccatcaaatattttttggacattgggctgctctagagggtagaactattagtgagcacatccaaaatgttgatggcggttgtgtatggggtaaaaacttaattgcttatcgtcttgaagatcaacaagttttttctgtgagcaatcctgttatgtaataaaaaaagccgctgaagcggcttttttatttttaagatatttattctaggcgaatccagatctgattacggcctaaagcagataccccaaggtaaccgcgcatatgtagacgtttaccatttgcactgagttttgcttttaatccgtaaactttaccagtatttgggtctagaatttttccacctgtataggttgaattatcagtttgcttgagcccggttgcgatatctaagcctaaaataggcttattggtataaggtgcaggacagttatcacaaatttcttttggcgtataacctgggcgtggtgttatttttacgattttacctgcataagtaccatttgcctctttccgtatttctacatgtgctttaggtgtacctgttttatcatcaatcgtttgccaaagacctgtaatatcagctgcaaaagtagctgtatttattcccactaggagcaaagctccaacaaaaaatttccccataatcaaaaaatccttttagatttgaaaggtccatcttatttgtaattaataacgggttcaatgtttatttaaactactttttaatcagtgtattccaaaagataacatgaaggttggtagccaaatagcagtaaatacaccgtttaatgccataccaaatgccgcataacggcctgctacaggtccacgttgccaagcctgagcagttccaattgcatgtgcagctaagcctagagctaaacctgaagctctttcatcgtgtatatgcttaagtaaaaatggtgaaaatgctgcaccaataactccggataaaattacaatgagagtgactaatgtctctggagcatgtaataaggtcgcgatgtttaaagcaattggggtggttactgcacgtgtcgcaaatgccaaaatagtcggctcagacatatgcagtaggtaagcaaggcccattggtaaagcaacggcactaatgctggcaaagcataaaataccaatcaccgatttaagaggtaaatcgtcataacgcattgcagccaaaggtatagctaaagcaaccgtgacatatcctaataaatggctgaataaatcatttacgtaaagtcgatattcttcatagggaactttcaagattgacaatagcccaatgacaatgaacatgccgaaaactaaaagaggaacttgaggaaagcggcggtttaatggttttgcacaaaggtagccaactaaagtgatcaaaaatccataaagaatcataaacattttattctccttataaccaatgttttgccatttttgcatagacccacaagggtataagggtgctcactaccaaaacaaaaagaaatagcggaatttctttacccatatgcaccagcataattaaggagcctgcacaaatgggtaaaaaagcaaaaccactttctttcatgactttattattagtatcgacaagtcttagcgggattttcttaaatttacgccaaatgagtaaaacgataagtaaactaattaaacctaccagattgcctaactctggatgaccaaaagcacgcataacgacgactgagccttcgcgaaaaccgataataagtagtaaggttcctacccatgctgcccagtctatacttttgatcttatccatattttttatctctaaaagtttacttatcaagttttaactgatctagtgcttgatttcaaactcttccagtggtcttttaaactgacttgcgcgttcacctaatatctcatctatagggagtttggcttggcgaattaactgctcaagcttatgaggtgcaattcgtatgtcgatatgtaatagcccttcatcgtcataatgctcagattgaatgacatttaaagcataaagttgagtacgcaatttgccataagcaggtttaagtaccaatgagaagtgttgaagttgtcccattagacattcttgtacggcttgacgaagtaaatctagacctaaacctgaatgtgcagatacataaacacgatctggaacatgaggctctgaataaataattttcgcttcttcgccactcaaatcaattttgttataaacacgaagtacgggtgcatccgctccaatttccttcaatacaccttcaacggcttcaatctggtcaagcatgtcatgactactactatcgatgacatgtaaaagcagggtcgcttcaagcgtttcttctaaagttgctttaaatgattcgaccaaatcatgttgtaagtttcgtacgaaccctacagtatctgctaggaccaccgtaccaattccatcccattctagacgacgtaaggttggatcaagtgttgcaaatagttggtcggctgcatacacatcgcttttcgctaaaatattaaataaggttgatttacccgcgttggtataaccgactaatgaaacagttgggatcgaagctttttgtcttgcagctcgaccttgcatacgggtttgatggactttctctaacttatcttttaactgggtaatacgaacacgaatgagacgacggtctgtttcgagttgtgattcaccgggaccgcgtaaaccgataccacctttttgttgttcaaaatcagcagaccaaccacggattaaacgggttgataaatgttttaactgagcaagttcaacttgtaatttaccttcatgggtccgcgcacgctgggcaaaaatatctaagatgagaccggtgcggtcaataacgcggcattttaaaatcttttctaaattacgctcttgggcaggggttaatgcatgatcaaaaataacaagacttgcttctaagtcctgaacttgttctgcaatctcgtcaactttacctgaaccaataaaaaacttagggtccggtttattacgttgaactttaatgtgctcaagaatatctgcaccagctgactgtgcaagtagagcaaattcttcggcatccagatcatctaataattgtacagacacactcactaatattgtgcgttcaccgccttgatgccgatcaacatattccacgtggctataaatcctgaataaggtaaaactttattctagaggaaacttggacaaaaggggaaagggtttactcttattctttagattaactacagcgcattttatttttatttgtgtctatcacacagcgatgcaagtttattccgaaacgtatagaatggctcgagatgggtataacaatgattgatcgttagtgaaattttatgactcaaacgcaaagtatagtgaattcaacgttaaagaaattttcaaaaataggtttatacggaaaaaaagttacttcagcgactgcggcaatcagtgaaggtttttacttagtttatcgtcatggactttataaagatccaaataaccctgttaacactcgatatgttcaatatttctgtcgtcgtttatgccaagtatttaatcttgaagttcaagtacatggcacaatccccagagagcccgctttatgggtgagtaaccatatttcttggcttgatatcgccgttttaggttcaggtgcacgtgtcttcttcttagctaaagccgagatagaaaagtggcctattcttggcaatttggcgaaaggtgggggtaccttatttattaaacgtggatcaggtgactccattaaaattcgagagcaaattaccgaatttttaaaacaaaatattccagttttatttttccctgaagcgactactacagatggccattctgttaagcgggttcatggtcgtttactcggagctgctatcgaagctcagcgtccggtacaggtatgtttaatctgttacgtaaaccgtcatggtgagttagataccgttgcaccatttattggtgagatgtcattcgttgagcatattcaacgtgtgctagaaatgccgaaggtaacagctcatttacttacacttcctcctatttcggtagaaggccatgatgtaaaaagtttgactcaagaagtacaagaaaaaatggttgaaggattggctcaattacataaaaaagtacttaagccaaaaatttaattacataaaaccttcgagtggcagccatgatagtagtttcatgcctgccttttgccaccatttcatttctggttcttttttataaattacagggccttttggagtttcctgttgccagtaaatatgattgtttggatcgagctttaatttataagcatatttgtttaagttttcatccatcgtatggtgaattgttttggccagtgatggactatctaaaattacgccaatttcagtatttaaatacgccgaacgtgggtcaaagttaaatgaaccaataaaaacctgttcatctaatgccataagtttggtgtgtaaacttgagcggcttaaacctttcatgtttactttcgctttagttgccagctcatccgtatttttatttaaatcgcgtttatctggagttggtaaaaactcatacagttgaacgccgtttttcaaaagttctttacgatattttccataaaacgcatgaacaacagctacgtcatttgctttgaatgagtttgttaaaactcgaacttctacaccttctttagcaagcgtacttaaaattttagcgccttgcttttctggaataaaataagccgaaatcaggtcaacattgctttctggtttttccaaatggttaatcaattggaaatttaaatgttcttcttttttcgcttttgatctaattttatcaggtgagtctttcacaacctctgctttaacccaatcaaatttaatattacggtctaaccatttatcaaaagcatgtgatctagaggttaagtcaaggaagttctgaacggtggcttgttgataatgagcatcaagttgttgttttaagctttcatagcgcaaacggtgttgttgagcactgacgatactttggactgaatatgcatattcatgattccagtagtcatcaaaagaattcacgatatcatcaacggcagcaccaaccaacatgacatcgacgtcagaaaactggtaactgtcactgacgttgtaatactgatttgtcatattgcgcccaccaataagcgcaacctgattatcagcaataaagctcttgttatgcatacgacgattgatacgctttaagtctaaaatcatatccatcgcgcgatatttgcggaaacggtaggggttaaataatttaacttcaatatttttatgttgagaaagcgcgagtaacacgccttccatctttttagcattattatcgtcaattaataaacgtactttaacaccacgatcagcagcacgaataattgcatgtaaagctaaagcaccgactttatcgttatcccaaatgtagtattgtaaatctaaagtcttttcggctttatcaatcagccttaagcgagccgcgagtgcttctaagggatcatttaaaagatgataacccgttaaattcggatttttttcacgtaaaggcgtaataatttttgaaagagaagtttgagatgtatcgatatctcgtgcgtattggattggttcagggctatgtttgggtaatgtgctacaacctgtcaaagccacagcgaaacttgaacatacgactatagaagctttaatcaaaaagccattagccagttgatgagtttgaagctgtttggaatgaaaggattgtgccataatcaatacatacgataaggtgagctagagtataattcgtgcatattgaaagataaatattgaatttgattactagcaatcaatataagataagtcgagaatcgtaatgtggaacccaaattcaatcatcttttgtttttaccttattttttcaatacttgctctctggggaattattgaagcctgggttcatcaatcacgtactgaaacgattcatccatttaaagcttttgttcacttacttgctttttatctatcttatcttcttattccactttggttctttaatttatatgccggttggataggttattactcaattcatgaaaccatttttatctttttattaagcggtattctcatttacgcacgttttatagagccacatatggtacgtgtcgatgttcaccaatatcgtttaaatccagatcgtcgttttgctaaacctgtaaaagtcgctttaattgcagacttacatataggcctattctctgggcatgaacgtcaactcaaaatcattgtgaaaaagcttaatgaacaacagccagacttagtagttgtggcaggagactggacttatgagccagaagataagctagtacaagaactgagtgttcttaaagatattaaagctccagtttattcagttccagggaaccatgacgagcaatatccaggtccgcctattcaacaattattaaaagatgcacttcactacaatgatgtaatggacattgaaggaaaaattgttgagtttgatgagtttcgtttaatcgggattggtgacttatgggcagggaaaactgatatgcgttcaatgccagacttacctcaagataaaccatggttaattctttcccataaccccgatacggtagatatggtccctaaattacctaatcgccctttaatgttgtcaggtcatacacatggagggcaggtcgaacttccgtgggtaaccaactatattatgaaaaaagtatcaattttaggccataaacgtggtttctattcgcatgaacacgccgatgtatttgttaccgtaggaacaggtatggttggaataccattaagatttcgtgtaccacctactattgatattattgaacttgtataaaataaaaaagccaatcacaaaggattggcttttttataatggaaaatttaaggaataattacgatagcaacacgacgattaattgcccgattttcattggttgtattcggtacatacggttgagttgaaccacgtccaataacgtaaatattttcctttttaaaaccgtgagtcaagaagaggttcgccacactttgtgcacgttcttcagataacttttggttgtattcaggattacctacatcgtcagtgtgaccaacgatttttaatttattcaaatcatatttatttaattgatttgctaaacgtgtaagctctgcttcatgactttgttttaatgttgcgtcattaaaatcaaataataagcgttctggtaaacctagagtccagccttcattagtaagtacaaacccttctttttttagcatttttacttgacgatatttcaaaggaccaaaactcaagcagcctgcaagcgcaatgcacagcaatgcaataaaggagagtttcaaagatcttgtattcataaattagcctaaatttaattctctggtttataaataaaccaatgttgctcagaagtcttagccttatacatcgcttgatctgcttgcataataaaatcttctggactagacgcaaattgggataaagcaatccctacactaaaactgaaataaatcgtttgatcatttagatgcaaaggttctttacagctttcgagtaaattttcagcaatagatattaaatgatcggcatgcgtaatggaatgcaaaataaccgcaaattcatcaccgcctaaacgggcaataaaatcttgatgacgtaaacgcgtttgtaaccttttcgccatctcttttaaaacctcatcaacagctaaatgtccgaactgatcattaattgatttgaagttattgttatctataaacaataaggctgacttattatcaaaatccttatcttcaaacatatctaatagtatttgataaaaataatgtctattcggtaatagggtcagctggtcatgatgagcttgaaacgataatttacgattttccttttgcagctgattatcccaaatctgaatttcttcaagtaactcattaaaaactgtatttagatcttgaaactctttaattcggttataaggaaaacgaaggttataagctttttgttcactcacgatttgagcaatatttgtgagtggataaatcgcttgcataatttgacgataagtcaaattcactgaccaccacaatgcacaaacaataaacagcatcgcaatagcaaggccgaccataatcatctttaaaaattgtaatattttttcagagctaccaaaaagggtgagttcacctacattctgttgatgatgataaatcgtcaaatgtaccggctcatttaaaaaccagtgatcaaaccatttctctaacaccgaagtttgactcgacaacttaaaactttgagcaatcaggtgatgttcagagtcataaatatgaattgctcgaatagagtgatcatttgtgtattcatttaagatttgttcgatcgtgatcttatcgttaaacacaacggcaggctgaatacgctcaagaagagtatggctaagtaattgcaaattttgttttgcataagtttccatcgtaaaaacggaaattgatacaaatgtaaaagagcaaataaagaaagttatagcaaagatcgtaaattgagactttctaaaaagtgcatgtagcgaagtggattgatacaacttagatatcataatccttactccgcgttcttagccaagagtaaaacccttggatcaatatggaccttggaatggcttaatgcatctaagttaactttaaaagtggtgtaattattttgattatataaacaaaagatactaccaacttcacattctgggttattaatacttaaagaaagcaaagaacgatatggataattctgaattaagttttgttgctgctgaggtggtgtagtagagaaataaacagcctggcaatgcgatttagaaaaatctttagcattaacggtttgtacacgataattataagataattgttgaatataagactggaaggtagaagtaattgatgcattatcaattacgcaaagagtaggcgtgcttacattctcccatttgctataacttaaaatagataaagtgagcacataaaagttatgttttgaattggcataagcaggcccactcgtagcaaacactacaagtatgcaaaataatactttcttagcggagtgccacatggtgagttaatgccaaatcaattgcacgaataatctattctacatgaagttgaataactaaaaaaagtttaatatctcatctaatatctagtaaaaagcctaaaaaacgaccgcttgatatgaaatgctagaaaaaggggttgcaaagggagagagatggtctataatgcacatccatcggcggtgatgcagatagaaacttgttgaaaaacagttacttgtgattaggttgattgctttaagtgatgaatttgatgatgagatggtttagagaataagttttaaaaatatcgaaattacctgttgacttttaagagattaagagtaatatagccgacctagcttgctggtgatgaaccagtaagaagatcattaagagaattgaagaacaacttgtgtggatttttactgattgattaatcgaaataattttcattgattgattggtttaaattactcgaagtttatttgagcgaaatttaagtcagtaattgatgagccagaattggcaccttgtctataaataaggtgcaaaatgattttaactgaagagtttgatcatggctcagattgaacgctggcggcaggcttaacacatgcaagtcgagcgggggaaggtagcttgctactggacctagcggcggacgggtgagtaatgcttaggaatctgcctattagtgggggacaacatctcgaaagggatgctaataccgcatacgtcctacgggagaaagcaggggatcttcggaccttgcgctaatagatgagcctaagtcggattagctagttggtggggtaaaggcctaccaaggcgacgatctgtagcgggtctgagaggatgatccgccacactgggactgagacacggcccagactcctacgggaggcagcagtggggaatattggacaatggggggaaccctgatccagccatgccgcgtgtgtgaagaaggccttatggttgtaaagcactttaagcgaggaggaggctactttagttaatacctagagatagtggacgttactcgcagaataagcaccggctaactctgtgccagcagccgcggtaatacagagggtgcgagcgttaatcggatttactgggcgtaaagcgtgcgtaggcggcttattaagtcggatgtgaaatccccgagcttaacttgggaattgcattcgatactggtgagctagagtatgggagaggatggtagaattccaggtgtagcggtgaaatgcgtagagatctggaggaataccgatggcgaaggcagccatctggcctaatactgacgctgaggtacgaaagcatggggagcaaacaggattagataccctggtagtccatgccgtaaacgatgtctactagccgttggggcctttgaggctttagtggcgcagctaacgcgataagtagaccgcctggggagtacggtcgcaagactaaaactcaaatgaattgacgggggcccgcacaagcggtggagcatgtggtttaattcgatgcaacgcgaagaaccttacctggccttgacatactagaaactttccagagatggattggtgccttcgggaatctagatacaggtgctgcatggctgtcgtcagctcgtgtcgtgagatgttgggttaagtcccgcaacgagcgcaacccttttccttacttgccagcatttcggatgggaactttaaggatactgccagtgacaaactggaggaaggcggggacgacgtcaagtcatcatggcccttacggccagggctacacacgtgctacaatggtcggtacaaagggttgctacacagcgatgtgatgctaatctcaaaaagccgatcgtagtccggattggagtctgcaactcgactccatgaagtcggaatcgctagtaatcgcggatcagaatgccgcggtgaatacgttcccgggccttgtacacaccgcccgtcacaccatgggagtttgttgcaccagaagtagctagcctaactgcaaagagggcggttaccacggtgtggccgatgactggggtgaagtcgtaacaaggtagccgtaggggaacctgcggctggatcacctccttaacgaaagattgacgattggtaagaatccacaacaagttgttcttcatagatgtatctgagggtctgtagctcagttggttagagcacacgcttgataagcgtggggtcacaagttcaagtcttgtcagacccaccatgactttgactggttgaagttatagataaaagatacatgattgatgatgtaagctggggacttagcttagttggtagagcgcctgctttgcacgcaggaggtcaggagttcgactctcctagtctccaccagaacttaagataagttcggattacagaaattagtaaataaagattaagatcttggtttattaacttctgtgatttcattatcacggtaattagtgtgatctgacgaagacacattaactcattaacagattggcaaaattgagtctgaaataaattgttcactcaagagtttaggttaagcaattaatctagatgaattgagaactagcaaattaactgaatcaagcgttttggtatgtgaatttagattgaagctgtacagtgcttaagtgcacagtgctctaaactgaaatgttgaagttactaacttgtaggtaacatcgactgtttggggttgtatagtcaagtaattaagtgcatgtggtggatgccttggcagtcagaggcgatgaaagacgtgatagcctgcgaaaagctccggggaggcggcaaatatcctttgatccggagatgtctgaatgggggaacccacctactttaaggtaggtattgcaacatgaatacatagtgttgcaaggcgaacgaggggaagtgaaacatctcagtacccttaggaaaagaaatcaattgagattccctcagtagcggcgagcgaacggggatcagcccattaagttatgtgtgttttagtggaacgctctgggaagtgcgaacgtagagggtgatattcccgtacacgaaagggcacacataatgatgacgagtagggcgaggcacgtgaaaccttgtctgaatatggggggaccatcctccaaggctaaatactcctgactgaccgatagtgaaccagtaccgtgagggaaaggcgaaaagaacccctgtgaggggagtgaaatagatcctgaaaccgcatgcatacaagcagtgggagcaccttcgtggtgtgactgcgtaccttttgtataatgggtcagcgacttatattcagtagcgaggttaaccgtataggggagccgtagagaaatcgagtcttaatagggcgtttagttgctgggtatagacccgaaaccaggcgatctatccatgagcaggttgaaggttgggtaacactaactggaggaccgaacccactgtcgttgaaaagccaggggatgacttgtggataggggtgaaaggctaatcaagcctggtgatagctggttctccccgaaagctatttaggtagcgcctcggacgaataccatagggggtagagcactgtttcggctagggggtcatcccgacttaccaaaccgatgcaaactccgaatacctatgagtactatccgggagacagactgcgggtgctaacgtccgtagtcaagaggaaaacaatccagaccgccagctaaggccccaaaatcatagttaagtgggaaacgatgtgggaaggcatagacagctaggaggttggcttagaagcagccaccctttaaagaaagcgtaatagctcactagtcgagtcggcctgcgcggaagatgtaacggggctaaaactatgtgccgaagctgcggatgtatactttgtatacgtggtaggggagcgttctgtaagccgatgaaggtgtgttgagaagcatgctggaggtatcagaagtgcgaatgctgacgtgagtaacgacaaaacgggtgaaaaacccgttcgccgaaagaccaagggttccagtccaacgttaatcggggctgggtgagtcgacccctaaggcgaggccgaaaggcgtagtcgatgggaaaatggttaatattccattacttctgtgtaatgcgatgagaggacggagaaggctaaatcagcctggcgttggttgtccaggtgaaaggatgtaggcatgtatcttaggcaaatccggggtactctatgctgagatctgatagcaagctgtacttgtacagcgaagtggttgatgccatgcttccaggaaaagtctctaagcttcagttacacaggaatcgtacccgaaaccgacacaggtggtcaggtcgagtagaccaaggcgcttgagagaactctgctgaaggaactaggcaaaatggtaccgtaacttcgggagaaggtacgctgttgttggtgatggaactcgcttcctgagctgacgacagccgcagaaaccaggccgctgcaactgtttattaaaaacatagcactctgcaaacacgaaagtggacgtatagggtgtgatgcctgcccggtgctggaaggttaattgatggggttagcgtaagcgaagctcttgatcgaagccccagtaaacggcggccgtaactataacggtcctaaggtagcgaaattccttgtcgggtaagttccgacctgcacgaatggcataatgatggcggcgctgtctccagcagaggctcagtgaaatcgaaatcgctgtgaagatgcagtgtacccgcggctagacggaaagaccccgtgaacctttactgcagcttgacactgaactttgaccttacttgtgtaggataggtgggaggctttgaagctggaacgctagttccagtggagccgtccttgaaataccaccctggtaatgttgaggttctaactctgtcccgtgatccgggacgaggaccgtgtctggtgggtagtttgactggggcggtctcctcctaaagagtaacggaggagtacgaaggtgcgctcagcgtggtcggaaatcacgcgtagagtataaaggcaaaagcgcgcttaactgcgagacccacaagtcgagcaggtacgaaagtaggtcttagtgatccggtggttctgtatggaagggccatcgctcaacggataaaaggtactctggggataacaggctgataccgcccaagagttcatatcgacggcggtgtttggcacctcgatgtcggctcatctcatcctggggctgaagcaggtcccaagggtatggctgttcgccatttaaagaggtacgcgagctgggtttagaacgtcgtgagacagttcggtccctatctaccgtgggcgctggaaatttgagaggatctgctcctagtacgagaggaccagagtggacgaacctctggtgtaccggttgtgacgccagtcgcatcgccgggtagctatgttcggaagggataaccgctgaaagcatctaagcgggaagcctacctcaagataagatttccctaggactttatgtcctctaaagagccgttcgagactaggacgttgataggttggatgtggaagcatagtgatatgtgaagctgaccaatactaattgctcgtgaggcttgactatacaacacccaagcagttgtatatgaagcatcaatcgattcttaagtatgcaagacaacttgatttagttatacctctagctaaaatgaacagataaagtaagattcaattcagcccagtctgttacagatttggaaaacgcttcggcattaaataagacctaagcaagtatccataaacagttgtgctggcgaccatagcaagagtgaaccacctgatcccttcccgaactcagaagtgaaacctcttagcgctgatggtagtgtgggattacccatgtgagagtaagtcatcgccagctcattattctaaacaccccaatctcaaaagaggttggggtgttttttttgggtaaaaagtggttagggaataaaaataaactgtgtattatctagctgaacgaatttagcctcaatcaagcaaaaatgtatcactcaacagaagaaggcttcttgaagtataaagagctaactttgcaagagaactctcttttaataataattatttcaactgtctgcgagcatgtttaagagcagtacgcaggccttcttctagtgttggatgataaaaaggtttctctaaaatatcatttaaagttagctcttctccaataatccagcttaatagatgagccatatgttctgtagcttcggtaaataactctgcaccaagcaatttctgacttcctcgctctatataaacttcaatagcacccttatttttcccgagtacgatagctcttccttgtctttcataagatgcttcacctgtaacaaaatctactccattatctttaagttgtttataactttgtcccacaattgccatttctggatgactaaatacaattcctaatggagtaagtgttttaactgcgtttacctgtggataattcaaacagttatgaacaacttttttaccttcatgggcagcttcatgttgtaaaggggtagaagtgtatgcatcaccagcaataaaaattggatagttatctagttgtttagtttttgcatttacaggtagtaatttaatatctttaaaagacttatcaatattttctaactttagcgtgtcaagtaagctcgaacgacctgttgcagataacacgtactcagtctggatagattcttctttttcattaattttataattcaatataacaccatcagaagtagatttaacctcatgaggcaatgtctcaaataaaaaatttaactctttactcagttcttcttgagcgagttgttgtagcttaggactagtaaatgtcccaattcttttactacgagcaaatatagtggtttctacacccaaacgatgcatggcttgggcaatttctagggcaattactccacttccaataatagtgatagacttgggtagggtgtttaattcaaatatttgatctgtagtaataagacgatcatctaattcttgtttccaagtttgatcataattaggtgtagagcctactgctaaaataaaactttttgactgataccgtttaccatttacttcaatagtttttgcatcaataaaatgagctttacccgaaattttatgttcagtgggccattgttcgacatcttttactgtggccttagtaaaacgatcacgtaaggttctcacatgctccataacctgatcagtactaatatctgctgaagcactcagcccaacctcttgagcattttgtatatcatgcatacggtttgcagtagagattaagactttacttggcatacaccctacacgtgcgcaagtggtatcccatggtccatcatttataattaaaatattgttggtatgtttaacggcttctttgtatgcgctaataccagcagtacctgcgccaatgatgataatatcgaacattataaattccaatatctataagtttttcacttaataagttacataataaaactcaatgtaatttatgtttacagagtatggtgaatatgattacactaataatataaataattaaaaaatcttatacctttaggaaagattggggaaatgaaaattatgtataaaaaacaacttaccttaaagttgtcggctattgctgtgtcaattatgttagcaagttgtggcgggggaggcggtgatggctattaccaaaatggttcatcaaataactcatcatctggaagtaataatagcggatctcagcaagcgactgctacagctttaaagatagaactagataaattatcagttgccgcaacgaatgatactttaactgttactgttagagctttagataagaataaaggcggtgttgctggtgctaatgtcactttggaattagatgatccaacaaataacgtatctatagaaggcgtatctactcaaactactgatgcggcaggtaatgctatatacattataaaaacaccaaaaacatcgagttcgataaatgagttggtgaaaaatggtttcaaattaaaagtctctacgaataatggtacgcttactcaagaacagacagtgacagtaacaggtagcaacagtactgtcgaagctgatactacgagtattgtattgtttgatgctacaaaaacctctctaaatgttagaggtgatcaaacaaccgtcacattaacagctgtagatgcaaatggtgcaactttagcaaaccaagcgattacacttaaagttagaaattcagttttaaatggtgtcaaatttactcctaatgcgacacaaactgatgtaaatggtcagatcagctatactttatcttttagtgaaaatcaaagaacctcatcatatagtgctggtcagttcgtaacagatgatcttgttttagaagcaaactttggccaatctacaaaaatttatacttataaacttgatgtggttaattctgatgtaccagtagcagtaggcgctattgccgtagcatataatccgaccacaatggaagattcaagtgatggagtctactactataaaaatatttcagtacaagtgactgatgtggatggtaaaccgatacccaatcaagatgtagtcatgggcgttaatgctcttgcgtattataagggtcgatatgggtttgttgatacttctaatccaactgatggtaaaccagatgaatatcttcctgttattagaacagcctgtacatcaccagtccaagctgtaaatgtgaatggggacgttattaatcaattaaagccgcttaaagaaaattctacagtccaagttgtatcgtatattaacagtgcaggtaccgctgcaaccaataataaatatacgacagatgcaaatggacgttttgatcttaaaattcaatatcctaaaatttatgcatcatggttaactgttcagttaacggctaaatctacagtttcgggaagtttaattaaaggttctacatccttaactttaggttatttaactaaagatgtcagccttacggatcttaatggcccaaatatggaaagtccatatggaatagatccaaactgttcaaatggtaattaatataaaaagaagcagcctttgagctgcttctttttttagagttgtgttcccatacttaccccgacagtagggcgtacttgcatagatgaacatgcgctgagaataaagcagcttactaataaaaaaatcaatttattcataaaataactaagaaaataaaaagtgacttaacaactttagctgaagacagtttgtatatctgttgaattgatgcagttgtatattttttttattaaaaaaaagctctatctttaaataaaaatagagcttatgaatttatttaatcgtctaacaaatccatttgtttggctaattgataaagattatttgaacggtttccagtacggcagaacatgaggaccggttttggaagttcattatagtgatttgcaaaagtacgaacatcaagttcagtaatttggccagctacaacaggctgataaacataatctaggccagcttggcgtgctgcttcttcaatttgagcactggtaggttgttctggaccaccttccatgtcaggacggttattaataatagatttaaagcctttttctacaacttgacccacatgttctgggccaatttgacctgcgaaaccaacattctctgacatttcgtcactccaaaatttaataaaacctcttatgctgtatcatagcattaagcttaacctgagatacaagacactaaaacgttgttcctacatagataaaatttatgtaaaagaacagctctagatttttaaaaggcgatcaggatgttttttgtaaattcattacttcgaccataatgccacggagcacatatgcacgcttatacggttgagcctttatatgttccatgtgatcaggaaatgatcgcagctgacttttatattccaaaaacaaataataaatctgcggtaattatcatggcacatggttttgccggattacgtcaattcaaactcattcaatatgcccagcgttttgctcaagctggctatgcggttattttatttgattaccgatattggggtggaagtacaggtaagccccgagagatgatttctatcaactctcaactagaagactggaagaccatgatccaatacgcttctacgtgtaaatttatagataaccgaagaattgtattgtggggaacatccttaagtgggggatatgctttaagcctagcttctgaattaaagaatattcaggccattatggtacaaattccatatgttgatggtgcggaaacagcaaaattatatccactacagcgttatccccaagctttaaagttgtcgagccaagattatatgggttcaaaaatgggccttaaccctaaaaggttacctgtggtagatcaatataaattgtgctttatgccaacagcagatagctattatggttatttatcgattgtgaatccggattattactggagtggagaagtcccggcacgcgtgttttttaatttgatgcgttatcgcccaattcaacttgtacgtcaaattaatattccagttttatttattgcggctcagcatgattctttgattccaattgagtctagtcgtgaagctgcgactaatattgctccttttgtgagttatcatgaatgggatatgaaacattttgatatctatcacggttcatggtttgaaaaagcagtgacgacccaattagaatttttacatcagcatataggagtgatgtaaatgattattgtatgtgcatcgtgcgatgcaaaaaatagagtaccagaggaaaaacttaccgctcaaccgagttgtggacaatgtcatcagccattactcccgcttgagccaattgagttaaatgaacaaaactttagcaactacatcacaaatagtgatctgcctattttgatagatttatgggcagaatggtgcggaccttgtaaaatgatggcgccacattttgcacaagttgcaaaacaaaatccacgtgtcatttttgccaagattaataccgaagagtctcctcgcttaagccaagcatttaatgtgagaagtattcctacccttgtattaatgaataaaaccacagaagttgctcgaatgagcggagcattacgcgcgcctgaattgcaacagtggctagatcaacaacttcaaacgaatttcgggagctaaggtgtcagaagcttataccaaaccagaaggaattttatccttacaaacgattgccatgccagcagatacaaactggagtggtgatgtgtttggtgggtggatcgtgtcacaaatggacttggctggagcaattcacgcggagcgttttagtcgtggtcgctgtgctacgatttccattaatcagatgacctttttggttccggtaaaagtaggctttgtcattagctgctataccaaaatcctaaaagtgggtaatacctctattcaaatgcaaattgaagtttgggatagccatgatgactctcgtgccccaattcgtattactgaaggggtctttacctttgttgcagtagatgtaaaaggcaacaaacgtcagattcctgaggaagcgaaacagaaatttcttgcctctcaagaatcgtaataaaaaagcactactatagtagttagtttagtttactttattttagcccaaatttgaatttgggcttttttatatctttatttcttacgtttaggtaaccatgcccataacatttggcattgaatcggttcattaccagcatcatcaatcactgtaactggaataacaagttcacctttctcatgatcagcaatatatttttgctgttcggtagagagagtcgctgttgctgttaaaccaccttcaaccacttttaaataatcaacatgtaatgatttgattaataaaatacggttatctggaatatgtaaacccgttagaaaacctgttgcagtttctgccaaaagcgccatagccgcagcatggacacctttaatatggttctgcatatttttttgattctctaagcgaaccgtcacatggtttacatctacttccagatagcgaatgtttgctgtacccaccattggcacaatgcggccaaatgccttactccaaagcgtactccgaatacctttagggaattttgaagttgcttttaccagttttaatagacgattggattgagacatgggattaccttaattgggaatatcatgctaagacattaatctttaaagttattaaattgtaatggcagaccaaattgttgttcacgtaaaaaagccatcacttgttgtaaagtgtcacgctttttatcagttacacggattttgtcaccttgaatagatgattgcactttgatgccactttctttaatggctttattaattttttttgctgtatcagagtcaaggccatcttttagtttaatcacttgtacaaaatttttgcctgatgctgttgctttctgtgggtcaagcgcttgcacatcaattttacgtttataaaagtgattttctaacatgttataaacttgttcacactggaaatcactttctgtactgatttttatctctttatttttttcatttaattcgatagaaacatcatgaccacggaagtcaaaacgtgttgcaatctctttttgggtgttttgtacagcgtgattaacttcaaataactctaattcggaaacaatatcgaaagaaggcatagtttagacctttacaaagtgaaagaatatttgagatgctaagagggttttcttcatttgccaagtgttgtttacatcaaaggagtgcacaatgatccgtaaacaagaaattacaacatttgagttcccagaaaatgctgttatctgggatgtccgtgattcaagtgcttatgcagaagggcatgttaaaggtgcggtaagccgcccaattaatgatttaaatgctgatattttgaaccaggtcgctgcggatcagccgatttatattttatgtggtggtggtagcaaagctcctcgtgcagctgagaaactagaaggcttagatgcctcgcgtgaatatgtcgtgctgatgggagggacgcgtgcagctcgtgacgcaggtttacctctagagcagggcgcataaaaaaagcaccttcgggtgcttttttattgggaccaaattttctcaagtgcactattgagatttaaaataaggtttcttaggtttaactttcttttgaaaacgttgggcatctaatttctgtaataggcttttgggaacaggacaagcttcacctaaaatttgggccactaaaacttcactacaaagcggcgcaaataaaaagccctttgagcctaaacctgcaaaagtagaaatacggctttcattctgcatttttcccacaagtggaaaataatctggactttgagcgcgaactgatgctcgtccttgccattgttcgactggtggtaattgttttgcataatgagggaaaacgctgtggattaattcaaagttatgcacatggtcatcaagcagtacttcttgatcgtctcggtttgggtagaaagaagcccctagaataagttcagacgtattcagttgcatacaataaccgccatagctataggcttcgtttaaaggtaaggttgcaaaagaattatcaacccagctcacctgtccacgtataggttttaatagcggataattttcaaataaagcagcactttctctggcgcagcacaccacgacatgatcagcctctaaagtagtttcattaccactttttaattgaactttattttcaaaagaaataagtgtcgtgatattggcaattttcagttcaatacctggatgttgcaaaatctcatcgcgtaattggtgcggagaaactgctccagcttcggtcaacaaaatatgtggatagtctgattcaagtgagcttgtttgctgcgtgacaatatcagcaggatattgatcagcaagatcgagaagatcttgtgcattttttaaagccatttgctgtatttgaatgggacgaaaggcttgaaaatttttatagaaatttaatgcatgttgccagcttaaagtcatgagatgctcatggctttgttcaattgggcatagtttcggattaagcaatgccaacggattgccagaagcacctgataacggcactgtacgctcaaatagagtgacctgatgcccacgttgagcaaatgcccaagctgtgcttaaacctgcaatcccagcgccaattacggcgatacgctgctgagtaaattggaaagtatctctaactggttctaataaaatttcttcacttacaggtgctttccaaacggctttaagcatttcccgtttatgcccaaaaccgcgaggacgagtaatatcgactccgtgagcctttagcccacgtttgagaataccagctacactaaatgaggcaaaggtagtgccatagtcggaaagccgaacaatattatttaaaacattttgttcccacatgtccggattacaagaaggcgcaaaaccatctagaaaccaagcattcactgccttcgtttttaccatacttggaaaaatatcttgtgcatctcctaaccataggtcgatgctgaagcgctcttctggaaaacttaaacgatggcagcctgcaagagggaagggatattgctcaataagttgtttggaaagcggtctaagttcatcccatacatttaaagcacgaatgagatcagctttgcttaaaggaaacttttcgacgctaattgcatgtaaatgactgtggttatttggacgtacttgttgccatagttgccagagcgcaagaatatttaaaccagtgccgaacccggtttctcctacactgaaatattcaaaatcttgtaaattggctaatcgttctgataggtcattgccatttaaaaatacatgccgtgtttcaagcagaccattatctttagaaaaatagacatcaccaaattgtttggaaatgggaacttcaataccatcaatagattcccaatccagctcagcagtttgtatacggtttgatttgttcattcggtttaataagtcgctcaggattaccactgacgtcgacgtttggtgtaaacataactcgcaataaagaagccaagcagtacgccacctgcaagagttactgcgccatataagaacatttgagcactacgttcactttgtaaaacttgtacctgaacagacaagttatcgttctttagctgcaattcttggttttgtgctagcgcttcaaggtttgcatgttctagctgttttagacgagatgcttgatcttgaactaaagccttaatttttgcatcttgctgttgcttgttctttgcgatttgttctgctgtaagcggttgtgttgaggttggtgctgttgtagtcgcgggtttagctacagttgcagaagtaggtgctggtttagcattctgtgttgacgctgcagttggaggcgttgctggtgtcgcagcaggttcaactgctccggcagttgaacatatcaaacacaagccaagaaagcttttggttgcaagctgcatgcgtttacccttttggaaatgctttattaaatggtttgacatcaacatgactatagatgccttctttcaaaaatggttcttcttttaaccattcatctaaggcttcacgtgtatcaaactctacaatcatggtgctgccatagaaaccagcttgcgggtcattagggtcttttggcatcgctccagcagcaactagacgaccttcatcatcaagtttttgcaaacgttcgatatgttgaggacgtactgctaaacgtttctctagagttccttcgttatcggtacagcttagaacaaaaaaaggcatgtcatcgtatctctataatcaatccgaaaccacattaagcatctggtgacttaaaatgtttacgtaaaataatgaactgaataatgataaatgaaaacatgacaatcatgtcaccaaatgcagtaaattcaccccaatattttccgccgtggaataaaaacgcaaagaaaacatgtaaaccagacatcacgacaaacatagctgcccaagcaaagtttaaatttttccaacctttttcgcttaaggctaaaatcggatcaaataaacgttgaataagaggcttacggtctttaccaaaccaaggtgaaactaagaaagcacctgcaaaaactagattcaaaatagcggcttttaagcggatgtaaaaatcatcgctcaacataagggtaataccaccaaaaatgactgtcatgaacagcacaatccattgctgtttatccagacggaacttttgcatgatgaacaacgcaccatacactaccagcattgaaataattaaaccggtagtagcgacaagaatattattattatcaacaccgccagcagacccgatcagtttgagtaaaggatgctgtgtatcggctggatcaactgtcttatataaataaaagaaaataattaatggaacaaagtccagtagtgctttcatgttagagtatctgatcaggtttggtgaatggcatagtataaaagatgcaaggcatagatttacatacacatagcaatatttctgatggaactttgtctccggaattgctagtgcaagctgctgtcgatgtgaagttgcatactttagcgctaaccgatcacgatacgatggatggattgcagcgtgcaaaaaatgctgcacaaccccatgatttgcaaattatttctggtgtagagatttcaagccagtggtcacgaccaagcacgaaaaaaagctatggcgtacatattgtggctttaaatatgcaagatgaagctccaattttagaagcattagaacaacaaaaaagaattagagcacaaagggctgaagttatttgtgaactattaaaaaaatgtattggctttgatatttatcaagatgtgctcgataaagttgaaaatcaaccagaccggattaccagaacccatattgctaaagccttagttgaaaagaatgtagtgagccgtcctcaacaagctttcgatcgttttttaaaagaagggaagcgtgcttttgtaaagtttgaaggattgggtttaaaagaaaccattgaggttattcataacagtaaaggatttgcagttttagctcatccaacccgttatgatttatcggctacaaatacccggtatttgattgagatatttgcaagttatggtggagatgcggtggagctgccgcctcctgtagatcctttatctactcgccaaatgattgatcgtatgattgaacagcatcatttggctatttcaattggtagcgattttcatggtgaaaatatgccgtggattaaattaggaaacacccctaaaccagcgagtaaccagcaaggcatttgggaacgttttatctaatcgcattttagagcaagttgttatcttgagcttgaattggaggaggtgtgggcttaccaagtgtccccaaaagctcaatttcgatactacgtaccattgcatctaaaggtaaatcattactttgcgtgccaaatggttcttcaatttcggtacttaaagcatcaagtcctaaaaatgtataagccagaattccaaccagtaaaggcgttgctaaaccaagcaaagatcctaagctaaacggcaacataaaacagaaaaaataaacagtacggttaagcaaaactgaataagcaaacggaataggagtatttgcaatacggtcacagccagtttgtacgacacttagatctgcaacattcttattcatttgagcataaataatatctgaaatttccccttctttaagcgcttgtaataattcccattgaataaggctaagcgtatattgaggtgcgttattttgttggtaaagttgggtaagtgcttgttggctcatgccactggtttgtattagctcggtggggttggctgtttgacggcgtaaacggtcacgtaatacattggcaaatacaataacgtgctgaatgacacgttcacggcgggcttgagttaaaattcggcagtcacggtcgaaatgacgcgaagttgcaatcaggaccccccataattttcgggcttcccaccagcggtcataacatgcagtattcttaaaacctaaaaaaatagaaagtacgacaccaattaaagtaaagccaactaaaggaatttctggaaaacgataaaggttaatgtattcaaccccaccaatgattgccgaaatcagcattactacccctaaagagggcaaaattttaggtaatatcgtccctcgccaagagaataaaactttaaaaatactgggctgttcacgaacaatcattttattttaaacgtcgctatttttgttttgatattctaagcttagtgaagctttgtcaatatcattgaacggctattgaggtagggttgagcagttgttgttcagcaaatgaaaagctaccttctggcgagataataaaatggtccagcagacgaatttcaacaagctgacaggcctgttcaagttgttgtgtgagtttaatatcttcgagagagggctgtgcggaaccaaatgggtggttatgtgctattactaattggcaagcgtgctgttgtaaggcataacgtaaagtttgattcactgaaacagcgcagtgttgaactgaaccaaaaaataactttttaaaatgtagttttctcaactcggcatctaagcaaagtaccgcaaagacttcttgtttttcaccttttaattcgtaacgtaaataatctagaactaaatgagaagaatgaaggcttagctcagtctgactaaaatgatagtcgagataacgccgtccaagctcttttacggccagtaattgggaatacttggtagctccaataccattaaattgagctaattcattgtaagatgcatcgaaaacagcgtttagactaccaaactgttgaatcagtaaacgtgcgagctctactgctgaatgttgacgtgaacctgagcgaagaaagatcgcgagtagttcagagtcagaaaggctttgagggccttgttgtaataaccgttctcttggccgttcttgttctggccaatttttaatagaagtattcatattccccagcaagattctgcttaaaaatttattttgtttgcccaatcaatcttgggtctgcgcgtatttaatgctattgtgagcgccactgcaacagaaaggtatcctgttcgtgagctttgatttaagtgttattcctcataaaaacattgttttagctgttacaggtgggattgctgcctataagagtgccattttggtccgtcgtcttaaagattatggttttgacgttcgggttgtgatgacacacggagctcaagcatttattacacctctaacctttcaggctctttcaggaaatcctgtacataccgagcttttagaccctgaggctgaagctggaatgggccatattgaattggctcgttgggctgatttattactggttgctccagcaagctgtgacacattagctaagtttgctaatggtttggcagatgacttactcagtactttatttttagcaactaaagcgcctgtgtgggtcgctcctgcgatgaaccagcaaatgtgggctgcaaaagcaactcagcgtaatttgcaaactctggttgaagatggcgtacatgtgattatgccagatgcaggggagcaggcgtgtggtgatgtaggcttaggccgtatgccagaaccagaagaaattgcaaggcaagtggcgggttatttccatcaagcccaacgtgcaattgctgaaaaatttgggttgttggcaggtaagcgagttgtaattactgctggaccaacccgtgaggcgattgaccctgtccgttatatctcaaatcatagtactggaaaaatgggctttgctttagctgcggcatgttatgcagcaggcgcaaaagttacgttaattgctggtcctgtaagtttagatactccaaacggtgttcaacgtgtaaatgttgcttcggctcgacaaatgttagatgtcagtatggagtcgcttgagactggctgtgacatctttattgcgacggcggctgtagctgattatcgcgtcgccgaagtggcagagcataaaattaagaaagcaggggatgagctgaatgtttcccttgtaaaaaatccggatattgtggcaaccattgcagctcaggaaaaacgtccatttatggtgggctttgctgccgaaacgcagaatgttgaagaatatgcagcagggaaactcgttgctaaaaagctagatatgattgcatgtaacgatgtttctcgcgccgatattggctttgcttctgatgaaaatgcgatgacagtattttttgctgaaagttaccatatgaaaaaacgtgagttagaaaaagcatctaagcaagaaatttctcaacagctagttgaagctatttcagatgcgttacgccgtaaataatttttgaaccaaataaaaaaaccgcgaataaatcgcggttttttatagtctcatttagacaatcaagggatttcatcttcaaattcaggtttgacctgaacaatgaagtcttgacggttaagaccacgccataaggcaaatgctgtaccgatataaatcgaagagtaagtaccgacaaagacaccgacaaacattgcaacagagaaccagtgtaagccatcaccacccaagaacatcattgcaagtactacaagcaataatgtcattgaggtatggatggtacgacgtaaagtctcagttaacgcaatatcaacgatttcacgtggagtcgcgccgcgaattttacggaaattttcacggatacggtctgaaacaacgatgttatcgttaagcgagaaaccaatcaccgcaagtaccgcagctaaaactgtcaggtcaaatggccattggaataaagcaaatgcaccaataatgatgatgatgtcatggaataaagacatcacggcacccattgcgagtttgaactcaaagcgaatggtgacatagatcaacattaaaatcagcgcaagtgcaacagcgccagccgaacgaacataaagctcgttacctacctgaccgcctacagagtccactttatgaacttctgctgcattgtttggtaattgcacagctttggtaatggcgttattaagatcttcaaccttaatatcttgtactggcatacgaacaagtaagtctttattactacctaaagtttgtactacagcatctttaaaaccagctttatcgagagcctgaataacttctgcctgatttgctggctgagcatagttaagctcagctgaaacaccaccggtaaagtccaaacctaagttaagacctttggtcgcaataaagaaaatgctcgctaaagtaataaggatcgagaagattgctgcaggtttagcaatcttcatgaacgggatgatttttgcatcatccggacgaccatattgttttgaaggctgttgagtcactttagtcatcatagatctccttaaatgctcaactttttcaagttacggcgtttaccataaatgatttgtacaatcgcacgcgttactgtaattgcagtaaacattgagcaaataataccgatcattaatgtcacggcgaaacctttaatcgggccagtaccgattgcaaacagaatgaatgcaacaaggaacgttgttaagttcgagtcgaaaatggtgttataggctcgatcataacctgccacaatagcctgtttaggtgaggccccccagagcatttcttctcgaatacgttcacatatcagtacgttggcgtcgacggccataccaatggtgatgacgatacccgcaatacccggtaaggtgagggaagcacctatccaagacataatggttaaaatcattgccaagttaaatacaagtgcaaagttcgcgattaaaccaaatagacggaagaacacgaccatccagattgcaacaagcaagaaaccgatttgcgttgatagtacacctttatcaatgttttcttgaccaaggcttggaccaacaacacgctcttcaacgaagtacattggcgcagctaaagcaccggcacgaagcattaacgcaagttcagatgcttcttgaggtgaacttaaaccagtaatacggaaagttgaacctaaaacggcttggacggttgcggcattaatcacgacagactcggtatatggtgtacgaacttctgtttgagcaccagtttttggatctgtaacgtagctaatcttttgtttattttcgatgaacaataccgccatgcgttttccaactgcattacgggttgcatctgacatcagcttaccgccagcactatcgagcgtaatatttacttcggcaccaccagagtcttggctaaagccagaacttgcattttgaacgcgttcaccagtcaagatacggttacgttgcaacaacagttggcgaccactatctaaagactgataagcaaaaacttccgtacccggaggtaacggttgaccattatatttacccgtatatggatcaatatattgatcatttaagtcagataccaaacggaattcgaggttagcagtacggcctaaaacacgtttagcttctgctgtatcttgaacacccggtaattcaacgacaatacggttgctaccctgactttgtactaaagcttctgcaacaccaagttcgttaatacggttacgtagtgttgttaagttctgattaactgcataagcctgaatttcttgacgacgtacatcagtataagtgagctttaagattgaacctgtcgtgctcgctaatgcctgttgggtatattcattaccattacggcgtaaaaaatccattgctgcatcacgatccgcattgtcagcaaactgaacagtgatcacattattatttaacgcaagattgttaaatttaattttgttttcacggaactgacgacgcaaatcagtggcagaggtttccatacgttgggaaatggctttgtccatatctacttcaagcaagaagtggacaccaccacgtaagtccaaaccaagtttcattggtttcgccccaattttttgcaaccattctggagttgttggtgcaaggtttagggctacaacatattgatcacctaagtcacggcgtaatacttcttttgctttcaattgcgcttcagaagagctgacacgcaagagagcagcattatttgtaaaagtattatcgtggcttgcaatatttgctgtttttaaaatttgctctgctttttgcaccacactttgatcaatttgggtaccagctttggcaccggaaatttgaacggcgggctcatccggatatagactaggcagtgcgtataatgtactgactaccagaacaaccagaatcagtaaatatttccatgcagggtaacgcattcgctttcttcttaaatgaaaaagccgtgctaaagcacgactgttttatgattaaaggttatttagagtgccttctggtaatacagaaattacgctggcacgctgaatttttacttctacaccacggttaagttcaacaaccgcatagtcaccttcaagtttagttactttgcccattaaaccgccagcaaagacaacttcgctaccaacacccaagctttcgattaaagaacggtgttcttttgcacgttttgcttgaggacgccaaattaagaaatagaagattgcaacgaatacaacaatcatcaaaatgtttggtaaaaggccagggctttgggctgctgctggagctgcatgtgcagtagaaatgaacaagctcattttaatttcctaaagttaaaaaatatgagtcagatacctgacataatcctaattcgttttgcaatttaccttgtcttgaggttgagcgcaaatctcgcttattcatcgacagggcatggtggaacttctaatccgcggcgggcataaaagtcctgaacaaattcatcaaaagtgccattgtctaatgcatcacgcataccttcagttaaacgttggtaataacgtaagttatgaatggtaccaagcatagatgccaacatctctccacacttctcaaggtggaacaggtaagcacgagtaaagttcttacaggtatagcaatcgcagtgtgggtcaagtggtccttggtcatgacgatatttactattacgaatacgtaccagaccatcagtgacaaaataatgaccattacgtgcgttacgtgttggcattacacagtcaaacatatcgacaccacggcgcaccgcttcaacgatatcttcaggtttacctacacccatcaggtaacgtggtttgtcatgcggcatcttgtttggaagataatctaaaaccttgatcatctcttcttttggttcaccaactgacaaaccgccaattgcgtaaccgtcaaagccgatttcaagtaagccatttaaagactcatcacgtaagtcttcatacatgccgccttgaataatgccaaataacgcatttttatttttaagttcatcgtggtgatgagtcttacagcgttttgcccagcgcaaagaaagctgtaatgatttttgtgcttcttcatgtgtcgcaggataaggcgtacattcatcaaaaatcatgacaatgtcagagttcaatacatgctgaatttccattgaaatttcaggcgataaaaagacttttgaaccatcaatcggagaacggaaagtaacaccttcttccttaattttacgcatagcgccaagactaaatacttggaagccgccagagtcagtcaaaattggcttattccatttaataaagtcgtgcaagccgccgtgttgcttgatcacttcaaggcccggacgcaaatataaatggaaggtattacctaaaataatttgtgcctgaatatcttcaatatcacgtggcagcatgcctttgactgtaccgtaagtccccaccggcataaaaacaggggtttcaacaacaccatgttctaaagttaaacgaccacgacgggcacgacccgactgacctaatttttcaaacttcatttaaaaatcctgaacaatagcaagcaatgccttagggcagtgcaagggcgaaaaaacagttcgctgctaaaaagagggctattttccttgattctgcgacgtagttctactactaaatgtagctgactataaaatcggtcaaatttccggttgaccgattgcttttttacctcgactaaaagttcggtttatagtcaaaattgtcagtagccaaattatctcgaaaaggacgaattgtttttttagataaagtcatcgtattgataatattatttgggaacacttcaatctgattattaaatacttcgacgttgcggttaaaaatgctgattgccgcgccgacattttcgttttgttcctgaatatcatccatcattttgccatagagcgtatctgcttttagttcaggatagttttcaaccacgacatttaggctgtggattagctctttgctcattttttcaatctgttgtaattgagcaatatcagtatgatcgacattcaaacttagaatttgctgacgtaaagcagttacttgttctaaagttgacttctcgaactgagtatattgattgagtgtggtttctagtgcttcaagtgtttttactttctggcgttcgaaattggcaacctcagcccaagcgcgtttggtcgcattgaaataacgcacaatgttattgcgaatgtggatgccccaagcaatcagtacaacgaaaatccccaagaaaatgaataaacctgtcatttttactcctcttattgttattccctcattatgccctctaacttcttattttttttaataagttgccagttcagcagtacgagagatttatttaattaaattaagcatgaattgctgaaatttttcatattgcggcatagtcatggtacgtaagtgaccacgtaatgcgggaatatcatgaatttcactacgtttactgatggtttgaaaaagatcttgctcaccgagataacataatatttgctcttcatgatgataaattaaatccccgctaaaatgttgaaaaaaatcatgaagttttaaagttagacttggactcatttctttagctaactggtgctggtcggttccgaaaatactcagttcttggttaatgagaatgtcactactttgccattcgcttaagtatggttcaaaaaagcgagaacgttgattacttacagcaatacctaaagctagtatttgaaaaataaaagcgccccataagtctttatgaatctcttttactatttttttatcgctgttctggtcttgaagaataggtaaattatttacatagtggtatttaaatagcaggacttgatgatctgtaatgccgtcattccatgttactgaagcaaactcggtaatttcattcgcttcattgcctcggttaaaaagtggaaagtgttgttttaatttgcttaagactaaaatgggttgggcttgtattggaagataagctggtaactgctgaaactttaggccataacgtaaagcagtcatatgctgttctaaataatgaataacttcagttaaaggtttttgcggttcatagagcaaataggcgaggaaaccagttaaaaatgcccataatagactccaactatattgaatatgaggatgaaaaaaatatccaaataatagcgtcgtaatactgcaaatacttaataaataagacagggtattcacaaaacgaaggttatgatcttcacgccatggatgtaatgcgtttaagagttcttgatcggtttgtgacttttgtccagcatcccaaagtcgggcaatattacgaaagacctgtgtattttttttacgtcttatatgaagtgcttgttgtgcggtatcaattggcatgaaagtaatgagttgattatcataaagtgctaactctagattatcttttaaattgaaagagataaatagaaatactaagactatttttattttaattatagatgctgggttaaacctcaaattaactaataagatttaacccagctttaatctttaaacttctaatttatcaatcagcattgcatcaccataactaaagaagcgatagcgatctttaacggcatgttcgtaagcagccaaaatattttctctatttgacaatgctgaaactaacatgagcagggtagactcaggtaaatggaagttagtaattaaacggtctacgatgcagaactcataacctggataaataaagatttgcgtatcaccagtccatgctgcgatttttccgccatgtgcttgagctgcactttctaaagcacgtgttgcagttgtacccacagcaatcactttattaccgcgtgctttagttgccaaaattaaatcaatagtttcttgaggaacatcacaccattcactgtgcatgacatgatttgtaatatcatcagtgcgtacaggcataaaagtacctgcaccgacgtgaagagtcacaaacgttttcttaacgcctttttggtctaactttgctaacaactcttcgtcaaaatgcaagcttgctgttggggcagccacactggcaattttttctggattatggaaaaccgtttgatagcgttcagtatcaatttcttctgcttcacgattgaagtaaggcggaataggtaactgaccatattgctcaagtactggcaagattggttgtgaaaactcaacgacaaataagttttcgtgacggccacgcacaatcacaggaatattgtcttcaccaacaaaaagctcagcccctgctttaggtgagttgcttgctttaatatggcaatatgctgtggtgtggttcagcatacgctcaaccaaaatttcaatcgccccacctgtggcacgttttcctttcagtcgagccttcatgactttggtatcgttgagtaccaataaatcgccttcttcgaacagatcaataatatctgtgaacatatgatcgtgatattggcccttagcatctaaatgcaataaacgcgaagcactacgtgtttcgagtgggtaacgggcaataagttcatcgggtagttcaaaggaaaagtcagacagttgcatatttgagaaaaaacaccgcaaaaattgcgcctagtataaactttttcgctttttaatggctgtgcttctggcctaaatcatgaaaaatgtttaaatgatctaaaagtgaacgataatattcacttagggtttgacaagttttgcaaacgcgctaatatacgcaacacaaacatacttcctctcccgaggtggtgaaattggtagacgcggcggactcaaaatccgctgtcagagatgacgtgtcggttcgagtccgaccctcgggaccaagattcagaatcttatgattctacgaaaaccccctaatctaacggcttaggggttttttgttgggtaatttttaattttctaaaaattttagttcaattaaagatgcacgtgaaacttattggtattcagaaattgttcctgaacaaacacggatagccaataccattaatgaatgggcaggggagactttagtccagtttaaaaattatgatgaaatgaagagttgattaatttaatgatgctttaatctaaattttctattttattggtacttcaatttaatatggtatctaagatactttatgttaaaataaaacaataaaaattttattattagtattggttttttatggataagaagtttggttatattgttattgcaataactatttttatatttgtgattttcgtatatggtctattccgtaattttatagaagtatctgataaattagattttacacctttaaagtatattgttggttttgtgttgacactagttatactggtatcatctatttcctcatatttggattctaataaatctagttctatggtcagagaaaaagaaaaataaagcaatataccgaattatttaataaaagtattgaagaggggtattacccatttagtgagaaaaataataatattaatatggaggaggtaactaatgaaattagaaataaaatagaattagcttctacagaaagctattttaaagaatttaaagataaagtaagagttgaagccatagttgatttttttatacaagaagctaagggcatagaaacaagagtaaaaggagaaatcaacaggttgtctaaaagtgctattattaatttgtcactaggaatgatgcttagtattggagggatattgtatctaggaaattttgttgtaaatgtacaaaattttggtagtattgaagaaatgattataaatacttttcctaaagccatttttgttttacttatagaagtttttgcgtattttttcttgaaattgtataaacaaagcttagatgatattaaatattatcaaaatgagttgactaatattgagtctaaaaatttagcagttcaaattgctaaacaatctaacaatcataaattaattactatatgtattgaaaaactcttaggtacagaaagaaactttattttagaaaaagaccaatcaacaatagaaatagaaaaagagcgtatcagttctaacaataccaataataccttacaggtactgaaagatattttaaaaaaataaaaatcaaaactaatattgaccctgcaaagtatctaagctacatcgaatttactactctactttagtggtggagattggcatctgacaaagaacagacagaaagaccgctgctaaagcggtctttctgtctgaaattttattattatctttaaggggagaataatgtcactaaattagcttatatcggaaattatccctcaatcatatgtacatatttatgccactcatcaattaaatcttcggagcatttattagtagggtaataagcattcttacattctttataatcatttcttgacgatttaatgtgctctatatagtaaaaaaataaatcaaataaagatgaatttccattaaaagagtaaacatgataatcaagatagtcacaaagcttagcagcttcacttcgctctccgctcctatttagagcgtattgacgaaatcttatttgatggaaattaaggtgtaattcatagaagtgttcaataaaatttatctctttatatgtttcaattaatctcatttcagaataaattaaaaataaaaaaagaaataatttctttcgattgtctaaattttcttttaataatgaaaatttattaataattcgtataagttgtcgtgggttgggagaataaatttgacataaattcatgtaaatatgaatttcagtatgatcaagtaatagctgaaagtcctgattatagttttttaaaatttcagaatatctattgccatctaaatctctactttttaacattatagaaaaatcaataaatttttctaaataattagctgtatttgagaatccataaaagttattgatcgattcttctagttgagttttattaatagcaagaatgaatacaacttttgggatatcaaaaaaatgtttgatgcgttcaataagacgaatcgcaaattctggcttacaacggtcaagttcatcaacaataaatactaaaggtttatctaatttagacgttatttttgctaaagcttctttaaagtattgtaaggattgcttttctttatcgtagttttcaacttgtgctgaaagatgctcttgtagtttttcattgagaagttttgcagcttcttttccaaaatcatcagcagttttaagtttttctacggtttcagctacaggtttagccaaggcgcccatacctacaagtgatgtagtaaggtaccaaagtaacattggtaagttaggaagaattgctctataagcttttcctatagtttctttaattgtatctatgtttgtttcttcattttcgagacaattagcaatttccatggaaatagttaaaaaaggatcatcaatataatcttgattaaaagcattcaaataaataactttaaaatcgttttgttctaattttgctttccaatttttaacaaaccaggatttacccgctccccattcagcgtcaatagcaatagttgccccaacagttatacgtgagacatgatctgttaaacgacttgctaatgcttcacgtccccaaaaatcattttcaaatggtatttcaattttatcagaaatgtctttaatgagtttataagaggtatcttcggaattagctgcgatattcaaagttttaagcctattatttattattgacggctaatagtatctaagctactctaaatttaccacccacatggtggtcgagtttggtcgctcgtttagaaacatatggtagacaaccgctactagcggatttttttttgtctataattcggtgcacccgttgttatggtggatcggatggggaggctaacgcctgccgttttacctgtgtttcacggtcgaccaaccccgttcggtctgccaccctagtttggtcgctgggatggcatagaaaaaccaaacacaggtgaatagaactatgactccattattaaaagctggtaacaagccagccagtccagaagacttacttcaaacagtcaatgactctctttctaaactagaacactacctatcagctctttcacgcatgcactttgacaatgacctaacaagtgatgagttcaacgccatcatgtgtgggttacaccttcaggtccacgagatctgccagcaaatcaaagcctgactaaaatctgaggggaatgggccgaagttgctcattctccttcagcgcgggcggttgtccccccaccacacctgggcagtaaatatgtcgaatactctacaaaaattcagtcacccacaattgtgggtaaaacggctgtagataaggcctactttcgagcaaaacaccacaaaattgattctgcatttttctacacggttacctcaaatttctacagaaagaaaatcattgaaaagtcacggtcaaaaacaggctttttaaaatcaaaataaaaaatctgaaattaggtaacacacacctaaaactatacttaagcacatgaaatatttaagaaaaagttgtcacaaagaaaggtaacattagggaacagattaggtaacacagtcattaagttattgataagtataaatatatttagtaacgctctgttacctgaaaagtgggtaacttgttgtcacctagatgtcacttaaatgtcactttataaaattaataaaaagattatattattcatatatttaaatactattttccaaatctgttacttttgttacctgatttttttgtcattagaaattttgagtttccatcaatttagcacttcttctgatgctttataaaaatcaccataaatcgtaccttcttccacatttacccacatatttttgattaaacctctgttattaaaatcttttcagaccccgaccctcgggaccaagattcagaatcttatgattctacgaaaacccctaaactgacggtttaggggttttttgttggatataaaaagttcctagactttaagaaattatgagctacttgctttggttccgagggtcgggatcaaatcgcttataaatttagagctattaaaggttttttaatttttcaattcaagcagactttatttaaatatgaaatgcatttgataaaagcaaaatttgagtcgaagttaaggtttcatattttataagatgatttaagctaatttttatctcttttctagctaattttgacttcctatttcttattacttacaactctttctttcaaaaaaattgttgtatttttctaaagcatacccactttatgtatctgaaaacctttaattgaaacttcacatttctatttcgaaaagaaagttgctcttttaatgtactgtgttaaagtttgtagtagatcataatgattataagtacattcttcaaaagagcggttccgaccaacaatgacaaaatctgtgaggcgggcatgacacagcgattagaactacatcaggtagagcagttaacagcttgtaaaatatcactattacttggattaaatgccgagcagaattatattgagcaatttttccggtttagtcttcgcctgttgaagtgtcaaaaagctttgcttacttttaatcaggaaccttatttttggcatcattgcccggatggcatgactgcaatttcctttaaaccttcaagacacctaaaacaatgttttgctaaacaacaggtgattcatcacaatcatccttcttatcaaaatttaatcaactatttaaaagagctaaatattgaatgtgggcgtgccttagctgtccatttagtgcagcctgatcagacctctatgggatttgcagttttcttcgatgacgatgaaacttgttttgaagatgatcaaattcagttgcttctcgattactgttctagctttatgcaacaagtcgagttgaaatttaattatgaagaattaaatgaactctatgagcagcaagtcgcgctgaactcgagtaaaacaaagttcttttctattatttcgcatgacttgcgggcgccgtttcatggcttgttaggtttctccgaagtgttagctaaagaacgtgaaacactggatgagtcgagtattcaaaatattgctgattatttatacgacacttctcaatcgacctataacttacttgaaagtttgctgacatgggcaatggccgaaggtggtcgctttgtttatcacccaattaattttaagcttagacaagtgagcaatattgtttgtgatgtgctgcatactttggctttaaagaaaaatattgaattggtaaatgcggtttccgaagatttaaaaatctatgccgatatcaatatgatgacttccgtgatccaaaacttggtgtcaaatgcattgaaatttaccgatgttgacggttctggaaaagtattcattgaagcgaagcaggtgggtacaaatgtcgaaatcactgtacgtgatacagggcttggcatgactgaacagcaaatggcaaatttattccatccgcgtattacggcaagctttaaaggcaccgctggggaaaaaggtgcgggtttaggtttgagcttatgtaagcgttttgtcgagattaatcaggggaaaattagtgtaacctcccaaaaaggagtgggaacgacatttaaagttttattaccttctgctcaagaagttcctgaacatcatgtagaacaacaaaatacatctgaagcaaaattggtttaatcccttttcctactactacttgaactgctataactaaaaagagagtctgaggaaaagagcttttttatatgaatgcggagcagttacaaaaaacattgcgtgccagccaatatgctgaacaagttttaggattacatcaggctgttttagaacaagattatcaaatagatcaatttgctgcaccgctctcaacagaacaaatttaccaacttgtagacatcacgcttgatggaattggcgatgaaataacttggatgcgtgcgcttcgtatactgcgcagtcgtttaatgtttcgctggatctggcaagatgccaatcaactgacggatgtcgttacacttactcgtgaactttcagactttgccgatgcaagtatttgtgccgcaaaggcttttgctcgtgttgcattggttgctaaacacggcgaaccattaagttattcaggcaaagttcaagatttgattgtggttgccatgggtaagcttggggcacaggaattaaatctatcaagtgatatcgacctgatttttgcctttgatgagcaaggcgaaaccaacggtcgtaaatgtattgatgtacagcagttttgtattttgtggggacaaaaacttatttatttacttgaacatatcaccgcagatggttttgtgtttcgagtagacatgcgcttacggccttggggagatggctctgcattagcgattagtcatgcagctttagaaaaatatttaagtcagcatggccgtgaatgggaacgttacgcatggattaaggcacgcgttgtcactgggggtaaagaagggcaagacttattagaaatgacacgtccttttgtattccgccgttatgtcgattacaccgcttttgctgccatgcgcgatatgaaagcgatgattgagcgcgaagtattacgccggcatattgaagatgacattaaactcggggcaggcggtatacgcgaaattgagtttattgttcaggtgttccagcttatttacggcggttctaaacgtgagctgcaagaccgtcaatgtttagttagtcttgaacatattggtgaggcaggcttgttagaaaaacaggccgtacaagagcttgaagatgcttacctattcttacgccgtgttgaacatgcaattcaagccttgaatgatcaacaaacgcaactattaccagaagaagcagatttacgacaacgcattatagatactttgggttttacgagttggaatgaatttattgatgttcttaacgagaaacgccaaaaagtaaaagttcagtttaagcagctcattgaagacacaagttccaatgcagctaccgagaactttggacagttagagcagcagctagatgaagtgttagatgataatgcaaaaaatctgattcatgagttctggcatggtcatgcacttaaaaaacttccttccaatgccgtgcagcgtttaaaaacattttggccccatttaattgaagccattttacagtctgaacaaccacaaactgcattattacgtttaatgccactgattgaatcagtcatgcgtcgaaccgtctatttggtaatgctgattgaaagtaaaggggcattacaacgcttagtaaaaatggcgacagtgagcccgtggatttgtgaagagttaacccaatatcctgtattgctggatgagttcttgtcgatggactttgagttaccaaagcgtaaggacttggaagactcattacgtcagcaattacttcgtatcgaaattgatcaggtcgaagatcaaatgcgggtacttcgcctatttaaaaagagtaatgtgttaacggtcgctgcaagtgatgtgttagctgaaagtcctcttatgaaggtctctgatgctttgacagatattgcagaagtcagtgttaatgcaactcttaatttagcttatcagactgtagcaaaacgtcatggttacccaaaagatgtcgagggaaaacgttgttcactcgattataaagcctttgccgttattggttatggcaaggtgggtggcattgaactgggctatggttcggacttagatcttgtctttattcactatctagatgaacaagccgacacggatggtactaagtcaataacaggttttgagtttgccatgcgtgtcgctcaaaagtttatgtctttaatcaccactcaaacgcttgatggccgcgtttatgaaattgatacacgtttaagaccttcaggtgaggctggtttattggtgacaagcctgaaagcctatgagcattatcagttgaaaagtgcatggctttgggagcatcaggcattagttcgtgcacgttctattgcaggtgatgaagcgctttgccaaaaatttgaaatatttcgccgcgagatattgactcaatctagagatgaggcttatgttcgtgaagaagtgctgaaaatgcgtcagaaaatgaaagaccacttaggttcatcttctgaacaaaaaaaacatggtatttttcatttaaaacaggacgcaggtggtatcgtagatatcgaatttatggcacagtatgctgtacttgcatggagcgggacgaaacccgatctcgcccattattctgataatgtaagaatattagaagatgctgctaaagcagactgcttatccagtgaagatgccacagcattaattcgagcctatcttagtgaacgtgccgaaagccaccgcttagcccttgcgaatcaatccatgcaagtaagcgcagcggactggcgtagtacccgtgcggtcgtttgcaatttatggcaaagattaatagacccaaccgcctcggttgagttggatagtgaatgattttataacaatttggagtgttccatgaatttggctgatcgtgatggttttatttggcaagatggacaattaattgattggcgtgatgcaaagattcacgttttaacccatactttacactacagtatgggtgtgtttgagggtgttcgtgcttatgaaactcctaaaggtactgcaattttccgtcttcaagaccacacaaaacgtttgttaaattcagcaaaaatttatcaaatgaaagtgccgtatgatcaagcagcgcttgaacaagcacaaatcgatgttgttcgtgaaaataaattagcttcttgctatttacgtccactgatctggatcggttcagagaaacttggtattgcagcaacaaataacactattcatgccgctgttgcagcatgggcatggggtgcatatcttggtgatgaagcaatggtgaaaggtattcgcgttaaaacttcatcatttactcaccaccatccaaacgtgaccatgtgtaaagcaaaagcatctggtaactacacgttgtcaattcttgctcaccaagaagttgcacattctggttacgatgaagcaatgcttatggatccacaaggttatgtgtgccaaggttctggtgaaaacgtattcttgattaaagatggcgttttacacactccagatattgcgggtggtgcacttgacggtattacacgccaaaccgtgatgacgattgctaaagatcttggttatgaagttgttgagcgtcgtattacgcgtgacgaattctatattgccgatgaagcattcttcacaggtactgctgctgaagtaacaccaattcgtgaatacgatgaccgtcaaatcggtgcgggttgccgtggcccaattaccactgaaatccaaaagactttctttgatgcagttcaaggtaaaaatccaaaatatgaacactggttaacttacgtaaaataagttaatccgttaacatgaaaaggcgaacgttggtttcgcctttttatttttgggttagggagcttttatgcatattgtctatgtctctgatggtaaagcagggcatcgctcacaagctttaggcttgtttcaggcgatgcaaagacagcaggcaaatgcaacttttgaagaagtctctattaatgacttgcctgttatgtccttaatcaaagcgcttttttcttcaaaaaaatctctatttcaacaggcgcccgattttatatttggtgttggaagtcatacgcattttcgtgtctggttgctcggtaaaattttcaaaaaggctaagaccattattttaatgaagccgagtttgcctattggttgctttgattatgctgtgatgccagagcacgacggtattcctgcgaataatcgagtgattgttacgcgtggggcattaaatcctattcgtaatgaaaaacgccatcaagcttctagaattttaattgcattaggcggttcgtcaaaacggcatcaatggaaccaagaaaaagtattattaagcgtgcaaaagattgttgagaataatccggatgccgaaatcattctaacgacttcacgtcgaacaccagcagagtttattgatattttaagacaacaaagttttgcccagcatttacaaatatttccggttgagcaaacacctcaaggctggatttttgaagagatgcaaaaagcagaagctgtatgggtaacagaagatagtgtttctatggtttttgaagcacttaccgcgggttgtcgcgtaggggtcatagcaatcgatcggttgaaagacgatagaattacgcactcgattgatcaaatgatagaatcacaactaatttcacagaatacttgtgtcgtacagttgccacaaccttatgcttttaaagaagcagaccgtgtagcaacatatcttttagcgaaaaattaaattttttattttgagtaaataaatgaaaatattgcatattgcaaattttggctttaataaacaaggcgcacatttttactgcacagaccgtaaaatttctgccggattaattgaaaatggccatttcgtttatgattttagtttccgtgacatggctcgaatgggaacaatctttaaaaccaaaaaattaggggcaaagtgggccaataaagaagtactcaaagttgttaataatattgaacctgatttggtattgattggtcatagcgatttgatgagtccagatgttttaagacagattaaagagtcttaccccaatactaaaattgcattttggtatgttgatccgctttatcttgaaaacaaactcgactttgtcaaagcattttcaccttatctagatgctattttctgcacaacaggtggagaatatctccaaaagttaaaacagcctcatttaagtgtggcttatatgccgaatgttggtcatcgcaatgtagaaacactacagcaattttcaaactcaaaaactgacaaaacttttattttctgcggtgttgtttataaagagcctgagcgcgagaaattcttaaaagatttagcagaggctttgcaacaaggccatgtaaattatcaatattatggttgttttgaacagccaggtgtatatggtaaggcttattataaggttctgtctgaaacaaaaatggggctcaattactcacgccgtaatgatgtaaccttatatagctctgatcgtattgttcagctgactggtaatggtttacttacctttagcccaagaattccaggctttgagaaactctatactgagcaggaagtggtttactttgatgatcagtttgacttggccaaaaagatccaattctttgatcaaaacccagagcaagctgtaaaagtagcgaaagagggctgggagaaaacacgtaaatctttcaatgctaaacgcatcacccaatttatggttgaggtgacgtttaaacagcccctttcagaagattatgaatggtcacatgaggtttatgcatgatgtggtttttgtacgttgcggtgggcctgctagcacttgctgcactgttatatgtgctgggtaattatacattctggcttccgtttcgttcgagtaaactacctcgcattgtgatgttacatcaggtcacacctaaagatgctgcttctggtatgaatatgcctcctgaaaagtttgaacaactcttaacgctattaacgcgtaaaggggctatcttttgctttgtttctgagcttgaacaatatcgtaatcaaaagaatgtggttgctttaagttttgatgatggatttatggataattatctttatgcctatccactactaaaaaaatataacgcgaaagcaactatttatttggcaacgcaaattgaaggtattgaaaagcttactcatgagcaaatccatgaaatggctaactctggtttaattgaatttggtgcgcatactcaacatcatgtgaacttacttaaacttgatgaccaaaccgcttatgacgaaatgcttcagtctaagcgtgatgttgaagcattagttgggaagtgcccgagttttgcttatccatttggtcgatttaacgaaaagcaccagaaaatggcccaagagattggctttaaaaatgcagtatcgactcgtaaaaaaatcgaagcatatgaagcagataatcaatttaatattccacgtgtcagcacgcatggtgccatgaatgctttacagatgcgtatcgcccttgctaaaggacgttataagttatgaataaaattccatgtagtgtttatattgtcactttaaactgtggtgcttggttagagcgaactttacaaagtgtcagtgagtttgatgaagtcattattttagactcgggcagtactgataatacttatgaaattgcaaagcgttttgaaaatacgcaaatttctcaccaagactggcagggttatgctgggcaaaaaagtttagctttagctaaatgcagaaatgattgggtacttaatttagatggggacgaagtcttatctgaggagttaaagcaagaaattgttgagaccattcaacagaacaagcttgatgcattaatcaccccaattaatgatgtatttttaggtgttccgaacagtaaacatactaaaaaacatgcaaaagtgcgttttttccgtaggtctaaagggcattatgaccttgccaataaagtccatgaaaatgtgatcgtagatggtgaatctcaacgtgctcaacacgatatttaccattatggtgagtcgagcattttcgttaaagtcgaaaaaaataaccaatattccaacttaaaagcattagagaaataccaaaaaggaaagtctccaagcattgcaaaattggttttggtgatgccagtgacttttatgaagtcttattttattcgccgtagcttcttaaatggttggcgtggtttcgtaaatagtatgattaacgcattttatgcatttctaaaagaagctaagctttttgaacagaccatgaataaagataaaaaataagtaggcaagctatgaaaattgttcaggtattggcaactagcggtggagttggtggattagagcagcacacttttaaccttgttaatgagcttgctttaaaccatgaagtacatgtgattgcacatccttgctatgtagacaagtttagccaacaagtacattttcatgctatcgattttgcccgtagtcgttggaatatttttttactttggcaacttaaaaatcttattcaacaaatccaacccgctattgttcatgcacaagcaggaaaagcggctgagttgattgcccgcattaagccatttttatctggtccaaagtttgtaacgactgttcatggtactaaaaagaataagtctgcttatttagcaggtgatgcagttattgcggtgagccaagcgctcacgcaaggcattccagagtctaaagcacacgtagtttataacggggtatatcctcagcccgtacttacaactgaaaataaagaaaaattgcttcaatcgattcaaaaagattttactgagctagacacaagcaaaaaagttgttatgtgtattggacgtctagaaccagtaaaaaatatcagtttattgattgagtcgatgcaacagattgatgccaatttatggattgttggtgacggttcacttcgagcaagtttggaaaagcaagtcagcgaattgaacatgcaaaatcgggtcgcttttcttgggtttagaactgatgcgcgtgatctggtacaactggctgatatcgtggttttatcatcagatcgtgaaggttttccacttgttatggtcgaggctttacaggccgataaagcaatggcttcaaccaaagtgaacggtgtgatcgagtggttgccagagcaatatctagccgaaattggagatactcaaggtttagcaaaagcgattgaatatgcccttcaatctgaggctcaaaatgacttcagcccactatatgcaaaggccaaggctgaactgactgtaccagccatggctgagcagacgcttaatatttataaaggcctgctgaaaacttaattattttttggtgtaaggcggatggcatcaagtacgacgaaattatcttcgaaattaatagtatggcaaccgtcatctgcttgattccagtctggtaaaactacttctagtaatttttcttcataagctgctggactaagctgagtaatcgcttttaattcgatattgccgccataacgttttaaagaatcttggcttggccgaaccagttgccctttgtaaacaaaaggtttgcccgccatacggaactgctgacttcctcggcacactgggttcattgggtgctcttgccagttaggatttaaaatatcttcggtaaagaacaaatctaaacggtcaccaaactttttacaatcacgacgcgttgaggtaaaaagataccataagccctcatggtaaaaaggggtgctatcaaccgcttcaatattttccattaggttagaatgcttctcccatttcattggaaaatcagtacatttccagagttcaatagttttgttggcagaagactctggaatcatgtaccaagtgctatctattttaaatacgcaaggatatgagaggtggtaatcgagttttaaaatagtttcgggcggggtgtaagtgccatccttaaagacttctaaaactgaaagaaagcccaccggatgttgatcatccacctcttcaaagaaaataaaatgtcgtccattttcatgagcataaaagctatcggcaaaggtaaactttccaggagaatggatttcaaagagagaatctaattgctcaagtgttgtaaaaggttgttctaaccagccaaaacgcatataccaatgagagtcaaaagtttttgctttttttgcttgttggtacttgtaccattttttttggattaggcgatttagcattaaattttacactcgatataactataattagatagactatccctgactcattttaacatttgaatgaaatgaaaaaatatttaatcagtattgaatctacgaatagtgaacgtttaaaaaagttgttctctcaagcaacattttataaatatcgagatgaatttaaacaatttggggtaattgggaaaaatttaagtgttagtgagtattttcaacaaggggtagcaggcaagaagaaaccgatgacgcctggtgaactaggctgtgccatgtctcatattgctgcattaaaagattttttaagctctgatgaagaatatgccattatttttgaagatgatgtaatcgaacgttttgaaattgattttcaagatttagaaaaactcattcgttctttgaattttggtccttgctttttcctaagcttgggcggtattcaaatgaaaatatgtaatcgggttcgaggaaaacttttacctgaagaattgtataaccaaaaaattcttaaagtggattacgattatcttgaaaaacttgcttatgcttatgcatatgttgtagatcgtaaaatggcacagatgttggtcgactatcatcaaccgataaaaatttacgaccattggcaagaccttgtagggcgtggtgaatttagtttttatgtcagtttcttattcgatcatcccattattgagaacaatgatgctttaagctatttggagaaggaaagaagcttagtcggttcgcattctcaagacgatagtgattttttgcgataccttagagttaaattaaagaaatatatacttaataaatatataatttaggtgtctctttcgtttttattattaattttatggttaagcaaaaaaatattattattgggtcagctacaggatacaacgctgacctgatctcttcttttgtatattctttgggaaagacagactttgatggcatattgactttaattatatataaagagcaaatgacagagtttgtgaatgcattctcagacgtcaaaaattttaaaattgaatttaaagtttcaactattggtaaatttaaatcaaagtcaaagtattcaggtatttataaatataaatttgtgaaaaatatctttaagaaaattattgacttaaccgtaaacgaagaaaaacccgaaacaaagataaaaggccttaaaatcacaggttatcctcatgtgagccgtttctttgaatataaagaaattctagaaaatcatcctgatgcttcacatgtattgctaactgatgttcgagacgtttttttccaaagtaatccttttaagaatcttagcaaaggtttatttgtcggaatggaaaatccagactttacgataggtactgagcaatataatcaaaagtggattttggatgcatacggagagagtttttataatcttgcaaaagatgagcaagtctcttgttctggcgttactattggggatcatgaatcaattaaagtctatatcaataaaatgattgaagaattctgtaaacagccatatcagaaaatgtctaacagaatttatgatcaagccatgcataataaattattaattactaatgagttggcagaggtaactcgttgtcagccatttgaatctattattgtaactcttggattatatccaatagagcaaatttctattaatgatcaaggttttattattaaccgtaaccaagaaatcattcctattgtccatcaacatgacagacatgcggaactgattcagttatgtgataattatattggaaaataaatttaagattttctaaatgttaggtcagatgcggatattaatttttatccgcatttccttttaagaccatataaatcagcgcaacaaaaataagtaatgcaccgactaaactacttacgcagaaataaagaatacgttgatttgttgtaaggttaaataattcattcgcaaggatatagcgcatgaaaaaccattgtgcgagagaaaatacaatcacgactaaagcatgtcgacgaacgtcaggacgcattgccataatcaattaccatgggagaaagagaacagttattatgccatttgcctactatcatctcaatagagccttaattaagctaattgcatagaaaaattaaaattatggagggattgtgaagttttattaacattaataaaccatgatttccttttttatagaattttatctagtaaattactgcatttatttggatagatgtttaatgcagccgatcgattttgtaatgatttgggtggactcaaccgatacgaaatggcagcagcaatatatatattataaatccaaagaaacaaaaaccaagattgatgagctcgttgatcaatgtcgttatcgtgactggaataatcttcattactggtttagatctgttgagaaattctgtccttgggtaaggaaaattcatcttgtaacctgtggtcattttcccgaatttttagtcaaaaatcatcccaaattaaatttagttactcatgatcaaattatagaacctcattgtttgcctacgtttaattcacatgcgattgaaatcaatattcataaaatagaaggcttggcagaacactttgtttattttaatgatgacacctttattaatagccctttagaaccagagttcttttttaaaaatggtttaccttgtgatggtattcaattacaacctttgatggtggtgggggaagagaactttttaggcgcagttgctttgacggatgtcgcaattattaataaatattttgataagagaaaactctttcggagtaatccttctgcactttttaatcatcgatattcgataagtaataatttgggcaattttttaagcttatataatcgaaaattctcaagcttttatagtactcatttaccccaaccgtttctaaaatcggtgtttgaagaagtttggagaaacgaagagagctacttaaaagaagtatcaagtcatcgatttagacaacctttagacgttaaccaatacctatttcgattatggcagttatgttcggctcgtttttacccagtaaatatatttcagcgtgggcagaactttaatttaagaatacaaaatcttcctgaaattaatcatgttattaagaatgagcaacttccacaaatttgtctaaatgacgatgaacacgtggttgattttgaaaaattaaaaacagaaattatccaaatttttgagcaaaaatttaatacggtttcgagttttgagaaaaagataacacattaaaattttcttaataaaaaaccctgcaattgcagggttttttattaaagagcaattaagcttctttcttttgttgttcacgtaagcggatgcccaagtcacgaagctggtttgcttcaacaggagccggtgcttgagtaagtggacattcagcagttttcgttttagggaacgcaataacatcacgaattgaagtcgcgccagtcataagcattactaaacggtcaagaccaaatgccaaaccaccgtgaggaggtgcaccgtaacgaagcgcattgagtaagaagctgaatttttcttctgcttcttcatcggaaataccaagcgcttcaaaaatcgctttttgcatttctaatgtgtaaatacgaagtgaaccaccaccaacttcagtaccgtttaataccatgtcgtaagcaacagaaagtgcttcgcctggattgctcttcacgtcttctacgctagatttaggtaatgtgaatggatggtgaacagaagtccatttgccatcgtcagtttcttcaaacattgggaagtcaacaacccaaagtggagcccactcacaagtcgcaaggttcaagtcatgaccgatcttgacacgaagcgcacccattgcatcatttacaattttagctttgtccgcaccaaagaatacgatatcgccattttcagcgccaacacgttcaagcaattgcattacgattggttcgatgaatttaacgataggagattgaaggccttcaattcctttttcgatttcattgactttaatgtatgctaagccttttgcaccgtagataccgacaaatttagtgtattcgtcaatctgactacgtgttaatgaacctgcgcccggtacacgaagtgctgcaatacggcctttagggtctttagctggacctgcaaatactttgaactcaacttcttgcattaagtctgcaacatcaacgagttttaacggaatacgcaagtctggtttgtcagatgcataatcacgcattgcttcgctgtatggcatacggcggaatttttcaaattttacgccaagcaagtcgttaaataatttaacagtcataccttccatcaaatccataatgtcatcatcgtttaagaacgatgtttcaatgtcgatttgagtaaattcaggctgacggtcagcacgtaagtcttcatcacggaaacatttcgcgatttggtagtagcgatcaataccaccaaccatcaacaattgtttgaataattgtggggattgtggaagggcatagaagctaccattttgtacacggcttggtactaaatagtcacgcgcaccttcaggggttgcacgagttaaaattggagtttcaacgtctaagaaaccatgatcatctaaatagttacgaatcaagttggttactttagaacggaagcgtaaacgctctaacatttctggacgacggatgtccaagaaacgatattttaaacggtgttcttctgacacgttaatagtgtcatcatttaatgggaatggtggagtttcagatgcagcaagaacttcgatttctttgcctaaaacttcgatttgaccactcaccatatttgggttttcagtaccttcataacggcgacgaacacgacctgtaatttttaatacatattcagaacgtgctttatctgcagttgcaaatgcttctggagtatctgggtcaataaccacttgaacgagaccatcacggtcacgcatatcaaggaaaataacaccgccatggtcacggcgacgatgtacccaaccgcataatgtaacggtctggtcgatttgggcttcagttaaagagccacagtaatgagttcgcatcatgatgaagattatccaaactatattggctgaaaagacggatgcgtaaaccgcgcaccgtcaaaaaataagttttcgattatgccctgttgaatggcatgccacaagaactagatcaaaaaacagctataatttagctaaaaatgagcaatttggcagcaagtttagctatttagcccattctttgttgtcgatctaaaaataagaataatagacatcctaaactaaacgtacttaaccaaccttgcataaactcattaatagagcggccagtaaaataataggtatcagaatgccaaacctcatggggaatataacgggcatagtcccaaaatgaaaataagcctaaaagtgtagataaagcaaataaacaccaagcaaaaattttaattttataatttactttccaatgctgtttatggcgctgatagtactgaatactcatccagcctaaaaaaggtaatgccagagcagaagaaccgagttgaagaaggcgatgcaatggataagggcggccaaacaagtgaacagtttgcgataaaaagtcttgaaatataaaagttctaaagtctgagtgggtaagcccatcccaaatgagatgtgttgctataccaatgagtagagcaattatgattccaataaaaaagctaaaaaaaagtctaaaagaatctagttttaaatcgtgttggataccaaaaaaacggtaaagcacaggtcggtaaagtaaataccaaatggcagagaataatagccctaatgcaaggttagggtagaaaagccccttccattgatgagtcagcatacctgattgcattgtaaataagcggtaaagatcgggcgtcatactgccaattgctaaggcggcaatgggcaacgtgtttcggctcaatttagcaagtggaggggcgataactgcatgggagattgtaaaaggcattagaaaagaaagcttctcacatcatcaaaaagttgagtctatcgaaacatgtcattagcgaatgttttttattgcaaaacaactgaaatgttataatataacaaaacaaaaggcgtacgattagagactcacctcatgttgttctataaaaatattttgaccttatccattttggctgccatatccatacctgtatttgcagcagaaaatgaaaatgttgagaagttagaaactatccgcatcaaggcacacccacttgagcaaacttcaaaagattttgcagtcgcagatactgtagttgaccaaaagcatttgactgaaggggctgccactattggggatgcgctcaatagtgaggtggggatttatgcgaatcagtttggggctggttcaagtcgcccagtgattcgtggccaagatgggccacgtgttaaagttcttcaaaattcatctgaaaatgtggatgtctcaactttgtctcctgatcatgctgtaacagtagatccagttcttgcaaaacaagttgaagtgattcgtggaccctctactttattgtttggtgcgggaactgttggtggtttagtcaacgttattgataacaagatccctacacaaatgcctgaaaatggttatgaaggacaagttggcttacgttacaacactggaagtgatgaaaagctggcgagtgctggggtaactgtagggttgggaagccaagttgcattacgtgttgaggggttaacacgtgatgcgaataactatattgcaccaaactatattcatgaaggtgaaaaagagcgccgtgtagacaatacctttgcacaaggtgattcagtgaacgtggggttgtcttggatttatgatcgcggttatacgggtatttcgtatagtaaccgtcgagaccagtatggtttaccggggcatagccatgaatatgagacctgtcatattcatgatctaagtttacattgtggagaccatgaccatgaagggcatagtgatgaagaagctcatgaccacgagcatgaacatggcggtccatggattgacttaaagtctgagcgttatgattttaaaaccgagttaaacgatccatttgcaggcttccaaaagttacgtgcccaagcgagctatacagattatcagcatgatgaaattgaagaagggacaatcgcgactcgattccaaaacaaaggttatgatgggcgtattgagttagtacataatcctattgctgattgggaaggggtaattggtacccagttaggccaacaaaaactaaatttaactggtgaagaagcatttatggcaccgaccactaccaaaaagtggagtgtttttgctttagaacacaaacaatggaaggatgttcattttgaactttctgctcgtgcagatcagcaagaaatcgatgtagatgataactctaaacaagattttgacggttctgctttttcttatgctggtgctgccaactgggagtttgcgccaaattataagctttcatttgtagcatcacaccaagagcggctacctcttgctcaagagttatatgcaaatggtgcccattttgcgaccaatacttatgagttaggaaatgatcaactcggtaaggaaaaatcaaataatgttgagttaggtttgcattttgatcatgacaaacttgattatcatcttcatgtttaccataactggtttgatgactacatctatgcgcaaactcttgaccgttataaagacttccgtttagttcaatacactcaagataaagctcgtttctatggtgcagagggtgaaattggttatcaaattacgccaatatacaagatcagtgcttttggcgattacgtgcgcggtaagattgatgccgagggcaatgctccacgtattccggctggtcgtttaggtactaaagttgatgcagattttggtgatggttttagtggttctgctgagtactatcatgtctttaatcaagataagattgcggcttatgaaaccgaaacagaaggctacaacatgctcaatttaggggtagcatactctggacaatatggtgcaaaaacagattatcgcgtttatttaaaagcgaataacttgttagatgacacggtttatcaacatgcgtcgttcttatcaaatatcccgcaagttggacgtaactttaccgtcggtgtagattttagtttctaaggcttcaacacgaaactaaacttgaaaaatcaagccaaaagacctaatttgaaactatcaagttaggtcttttttatgcgtatttttcagcgaattcatcaaaagttaaattggtcaggacgtcgttatatggcggtcatactttgcgttgttgctattgcatatcttgcatcggcaatttatcacacagtgaaaccattgccgcaaggaattaactttagtggcaagctcagacatgccgatgttaaatttttagccgataaaacgtatattgatgcgaatgggcaacaacaggttgatcagcacatctttgatgaaatcttgaaaatgattgatgaggcaaaaaccacaattgtggtggatatgttcttgtttaattcagaagtgggtgactcgaaactcaagcaaagaccattgatgcaagagctcactgatgcactaattagtaagaaaagacagaaccgccaaattcagatcgttatgattaccgacccgattaattcggtatatggtggactaagccctgaacactaccgtcaattacgccaagctggtgttgatgtcatcgaaacgaatctggcacctttacgtgcttctaacccattctggtcagggttttggtacatctgttgccaaaatattggcaataatccagagaaaggctggttacccaacccatttggcgatgaaaaaattacgctacgtagttatttgaacttatttaactttaaagcaaaccatcgtaaaactgttgtcgttgataccgatgcgggttggaagtcattggtgacctcagcaaatccgcatgatggtagttcgcgccattctaatgtggcattggtggtaaatggagccacagctgctgatgtacttcaaaccgaagctgctgttgcgcaaatgtcaggaagtagttcaccatcacttattttaggcgattttgaaaaagacgttagcaagcctcaaattcaagtgctaactgaaggggcaatctatgaagctgtattaaaattaattaatacggctaaacctaaagaacatcttgatttaagtatgttctatttgtctgaacgtaagattattaaagctctaaaaagtgcccaagaacgtggcgttattgttcgtgttttactcgatccaaataaagatgcgtttggtagacaaaagaatggtatcccaaaccgtcaggtagcgtcagagttacatgctgctggcattccaattcgttggtgtgatactcatggcgagcagaaccatagcaaaatgatcttgaaatataatgctcaacaagctgagttaattgtaggatctgccaattttacagcccgtaatttaaaaaattataaccttgaaacggatatgttggttgtaggcaaagttcaagatcaagtctttaaagacgctcagaattacttcaatacttcgtggtcaaacctacaaggtagacagatgagcgtggattatgcgaagtatgccgatgagtctaaagtgaagtattggatttatcgttttatggaatggtcaggattatcgactttttaatcactatcttgaagttttccaaaaagtagcaaggtgattgccgacatgaatgtcgccgtttcactgtgttgcagggaagcaacatcagtgaaacaaaggtttttgtcacttttgacctctcaaaagtgaggcattagcttatacaaaagacattcaaatattattgtaagtaagggctgtgccataagtccgagttaaggcgtaggcggaatcaattgatccaaagccttatcatctaacttctctatttcactcaaatccgtcttaattttccactgcgactcatcatctacaggattcggcaaacgcgcttcaagccaatcacaaaccacatctggagaaaactcagggtgattacactgaataacccatgataaaaaatcttttgcttcaccattcatgtaaggtggtggagatacaggaaagaataaagtaggtaaacgctcattcgtcgacaggtaatttaaaacatgcccgagttcttgaacggtttgccatgcgagagggtgttctacatcaatactgaacttaaaccaccaagcgtgttcgccatctgctccatgagccatgatacgggcttcttgtacacttggaactttgcagaaaaattgatgaagacgttcaaaactgatttcagacacagcaattgacctagcttgaaaaatgctaatggtagcacagatacagattcttcatattttctttatagtcattacaaacaatatcaatcaaagccattttattcatggtttctccttgactctctcttaatctagcttcagatcaagataaaaaggaatactccatgaaaaagcctattgttctcgtactttcaacattaatgttgggtatgtcggcaactgcgatggccgattcaaatcatcgttgggataactatcacggtaaagaccataatcgctatgaacagcgtcatgattatcgttatgaccaccgcaatgatcatagagctcctgtttggtcacactctgagcgtggcaaccattatggccgatatgtagcctttaagcgcggtgatcgtattcctgtggaataccgtaatagccgttattatgtctcagactggcgtgcacatcgcttatatgcaccaccacgtggataccactgggtgaagactcctaaccaatacttattggttgactcgaaacatcacatttatcgagttcgttaaacgtaaaataaaaaaatggcccgcttgaggccatttttttatgccaactcgtcatcttgcggttggggcgtttttaacgaagtaggtgtttttgaatgtttttctttcataacagatgggtagtgccaagaagcaaaacggacaactaaaatagagagagctaaaataagaattgagccagtaataatgacttgatcaaggtcggctttatggtcatgttggatatcagaaataagtaaacgtgttagggctgtaatggcgacataaataagaaaacgtacaggcatatgattggttttaaagtaaattccaaccattgccccaagttctaggtaaataaataacaataagatgtcatcgattgatgcatattttttgacggtcagaatttcaaaaacggtatgagcagcagaccaagcaatcatacagcctataataaataaggctaaataatgaaaagcctcaacagcataatgtccaaaccgatcaagggttctttcaaactttttgggatcaggcatagtaaaatcttttttgatatgagaatgtttaaaaattaaacaaattttgtgccaatggaaatagtaaatacaaaataaaaagcgcctgattattcaggcgtttttattgaaatttagttcaattcaaataataagacgatatccactatcaaagcgatggctattccaaattttcatattgctgaatggcatcttcaaatgcaatatggcctaaaaatttacctatactctttgtgggctgttcttgttcaatcgcatgcgcaaatttcacagccgcctcattttgtaattgttcataaagtcgtttgcagtttggaaattgatcaatatcaataacattatgatatttcaaccaccgtgcgatacctgcgtagtatccgtctacaaaagataattgatcgcccattagccaagtttgatttgtcaggctattttctaaagcggtaaatgcttttttaacttggactgctccatattcacgtaatgcttgtttattaccttctgatgaagagtgttcaaggctataccagagtgggctaaatgcattaaataaagtcgtattcaaaaaagctagtttctgattaaagagattaaattgttctgttccttgctcataatgaaaagccgcattcaggctttttgccatgatatggttcaagatagccatgctttccgttaaaactttaccattatcgtagagcagtgcgggtgtttcgccgactggattaatttggcggtattcctcggtattacactgagccggcatctcaattctacagagctgataaggtaaacctgaccattctaaggcaacaatagaaccaaatgaacagccagatgggacgccataaaataaagtgaaagtagacatgatgattactcttttgtgatgtgtaaaatcatcttaagtcgccagaaaagtttctagtagtcaggtattatgagacttattgtctacatatatggacattgaagaatgctacttagacaaaacttgaatgatgtttatctctttgttgttgctgtagagcatcagggattttccgcagcagctaaacggcttaatttacctaaatcaacaatcagtaagcgtgttgcaatattagaaaaaaagctaggcttaaccttaattcatcgtagttcacgtagttttgtcttaagcgaagcaggtaaactgttttatcaacatgccaaaaatgcagtagatgagtttcgttatgcagaagaaaatttattaatacaacaacaagagccaagtggtgtagtcaggctcagtgcttctgtacccattgcccagtatcttttatctgattgtttgcctgaacttgcagaacgttatcctaagttgttattgcaagtagaggtaactgatcgttacgttgatgtcatgagtgaaaactttgatatcgtgatccgtagtcattttcaacccttgccggattctgggttaattcaacgtgtacttaaaaatgataaaatcatcgctgttgcagcgcctgcctacttaatgaaatcgtctcctatacatacaccagaagatttactcaaacacgaaggtatatggcctgaattgcaaatgaatccatggcattttcaaaatataaatggtcagaaagagatagtacgtccaaacatccgctttgtagcaaatgagtcggagattttaaagggggctgcaaaaaggggattggggattacgcttttacctgaaactttttgtatgaatgaactatctgagggtagcttaattcatgttttgccagaatggtctgctggtagcgtaacgacaagtttattgatgctaacaagacgagggcttttacccagtgtcaatattactgctgacttcttggttgagaaattaaaaacttaaaagttattctactttttatgattagaaataaaaaacgcctgattattcaggcgtttttataaaaaatttaattacgcttggtttgtaaagtaatcttcactaaagcccataattaagtcagaaccagctttgattttagcaatacgcgcatcaatatccggcaagatacgttcaacaaagtattgagccaatgcaagtttgttttggtagaaatcaccagatttatctttagcagcggcagcaatttttgcaaacatataagagaagctgagtagacccactgcatgtaagtaatcaacagcagcagagttcggaaactctacgttctctgcagcttgctcaataataaactgagtgattgcttcgatttcagttgcagcatctaaagttgcatctttaatgaagttcaaatcagtgtctaagtcatttgcaaagtcacgaatttcagtgatgtattcagcaatgaatgcaccgccacatttaatggttttacgaccaattaaatcttgagattgaacgccgttagttccttcgtagatttgagcaatacgaagatcacggatacattgctccataccccattcacgaatataaccgtgaccaccaaataccatttgagcatctaaagttgcttggaaggctgtatctgtgaggtaagcttttgcaattggggttaaaagcgcaacacggtcattggcttttttcacggcttctgcatcagttgagaatttagtgatatcgagctgctggcctacataaactgcaaaggcacgagaagcttcgttgtttgcacgtacatttaacaacatacgacgtacatcgccgtggactaaaatgctatcagcgggtttgcttggtgactgaacaccagctgcactacgaccttgtaaacggtcagtcgcgtattgagcagcattttgataagcaaattcagaagcacctaaaccttgaatacccattgataaacgttcgtagttcatcatcacgaacatggcagcaaggccttcgttttctttaccaacgaggtaacctttcgcaccgtcaaagttcatcacacaagttgcagatgctttgatccccatcttatgttcaatagagcctggaccaacatggttacggtcacctaaagaaccgtcttcatttacaaggtatttcggtacaataaatagcgagataccacgtgaaccagcaggagcatctggagttttagcaagtaccaagtgaatgatgttttctgctaaatcgttgtcaccgccagtgatgaagattttagtacctgtaatgttataagtaccatcttcattgcgctcggctttagttttgataatacctaagtcagtaccggcatgtggttcagtcaaacacatggtacctgaccattcacctgaataaatcttaggtaaatacgtttctttttgttcttgagatgcgtagctgcttaaagccatacctgcacccactgaaagaagcgggtaaagcatgaaagatggatttgtcgcgaataacatttcatcggcaagaacggtaagcatttttggcatgccttgaccgccccattcttcatctgcacctaagccaatccaaccaccttctgcatattgacgaaatgcatctttaaagccagcaggagtaaagacttcgccgttttcgtagcgagcgccttcttcatcaccagtacggtttaatggatgagtcacgttctgagcaaatttagccatttcttctaaaattgcttcagctgttgcagcatctacatgagcgagtttctcattagcctgccaaaattgttctgctttaaatacatcatttaagatgaatttcatatcagctaaaggagcattgtaaattggcataatcgttcaccttttttgtgcacatcggcctgtgctagatatcctgtaaaacgaaatggatattgaatttaaaatctaaatttatcattgattttataaaaaaaggaccgtcaaaactgagcagtccttttttggtttttaacattgcatatcgcaactaactatgattagaaagcgaaatgttcagcatctaatgccatcaatgggtctaaaccacctgcgataacgtctacatgagagcgtacacgcggtaaaattttcttgaagtagaagcgagcagtagttactttcgcattgtagaaatcaacatcggttgtacccgcagctaatttctcttgtgctacaagcgccatacgagcccatagataagctaaagtaacgtaaccagagaagtagaggtaatctacagccgctgcacccacttcatccggattttgcattgcacgcataccgatttgcatagtgaggtcgccccattctttgttcagcgcagcaagtggctcaacaaattctttcatggcagcattgtctttatttgcttctacaaacttgtgaacaatcttagtgaaatcacgaagcattgcaccttgagtttgtaaaactttacggcctaacaaatcaagtgcctgaatttcagttgtaccttcatacaaacaagcaatacgtgtatcacgtacgatttgctccatgccatgctcagaaatgaagccatgaccaccgaacacttgaacaccgtgcttagcagattcagaacctgtttcagttaagaatgcttttgcaattggagtcaataaagacaagatgttgtcagcaaacttacgctcttcttcagtttcgcctttttcaacgatatctgcatattgagcaagtaagtaaacaagtgcacgaccaccttcagcaaatgctttttgagttaaaagcatgttacgaacggcagggtgaacgataattggatctgcttctttttctggagctttaggaccagaaagtgaacgcatagctaaacgttctttcgcgtaagttaaagcaccttggaaagaagactctgatgcagataaaccttgaaccgcagtaccaatacgtgctgtgttcataaaggtgaacatacagttcaaaccacggttttcagggccaattaaataaccttttgcttggtcaaagttaatgacacaagtcgcgttaccgtgaatacccattttgtgttcaattgaaccacaacgtacggcattacgttcgcctagagttccgtctgcattgacgttgaacttaggaacgataaataacgaaatccctttagtcccttttggtgcgcctggtagacgagcaagaacgatatggataatgttttcagccatgtcgtgttcaccagcagagataaagattttctcgccagagattgcatagctaccatctgcatttggttctgctttagtacggataatacctaagtctgaacctgcatgagattcagttaaacacatcgtacctgtccaaacacctgaaacaaggtttggtaagtaagtatttttttgctcttcagaaccgtgatgttctaatgtacgtactgcaccgtgagacaaaccagggtacataccccatgcccagttagagctacctaccatttctgaaattgcgatacctaaagagttaggtaaaccttgaccaccgtattgttcttctgctgataaagacgggaagccaagttcgatgtatttttgataagcttctttaaagcctgttggtgtagttacaacaccatcattccaagtacaaccttcacggtcgccaacttggtttaaaggagaaagttcattttcacagaagtctgccgcagcttctaaatattgatcaaccaattcacggcttacgttaccttgaaagtcaggtaattttgcatagtgttcttcagcatttaataattcatgcaaaacgaattgcatatcacgtaagggcgctttgtattgtggcatatcgggttcctcaatactggtgaaaccagagttataatcctaatctacgataatgtgccataaggcaccttgaactattacatcgtgcaacaacttgcataactgtacaagcacctcggggcctttactttgtgactgcaaagtcaagaaaaaaatacttgaactatgtaagtgctttgagtgtaaacacttttgatgaagtttagatgagacaaatagtcaaaatcgtaaatagttatgtataaacaaaaggcgccttctggcgccttttgttttactgtttttagaattattttgcttgagatgctactggagcaggtgcattgactggtggttgaggacgttttggctcaaagcggaggttacatgtaccttcaagtgttttatctccaacttgaacattgacagtttgtccaacagctttaccttcacatgctttttgaatttgctcaaaacgagctttacgctctgcacggtgttgttcccatgctgctttttgttcaggcgtaaattcacggtgtttcatacgatggtggtgaccatcacgtgggccatcttgcatcatgccatgttctggcttaggtggttgagttgttgattgacaagcagccaaactacccatagttacaattgctgcactgaataatgcaattttagccgtcattttcatggttaaaaccctttaatgtttgttttaagatgacttaaagattagataataaagatgaagaaacaatggagagtttttcttttcgttgttggttacaatgcaaaatatagagtaaaaatgagagagtgcttttgaacgttctacgtgttcccatagccttgcggttatttttaacggtcttgcttaccacgctgttaattgcaactgcaagtttgagtgttctgcactggacgatgcaaaagaactttgccaaatatgtagccgatgttgaaatgcaaaagctagatcggctcattactaatctgggaaatgtatataccgtttatcatgattgggggaatgcgattcaggcgcaaatcttacaaattgaaggaacggcagcaccagatgattatgaccgtctttcccagtggtggttacggcgccaatatgatattgccattcagcagcattctttcgatgaacacactctcattaatatttctccagatgcgggaacggtaaataaaaactctatttttagtgatgaagaactacgtacacttgagcaaaacttaccttcggaatatcaaccatttgaaggtttaagattcccgctaagtgcaaaccagtttcgtccaagcgatgataaaaacaaatcaaaaaaaggaagcctcaaagacattgagacgcaaaatggtaagaagcgttttattgctttaccagaccggctgggcttaagttctcgtttatctttatatgatgccaaacaccagttcgtagtgggtgaaccgccgtcttcggatcagatgtcttatcgcccgattatggtcaatagtcaggtcgtaggttatttaggtctaaaaccagttttagataaagaagatgcattaagtattaatttcttcagtaatcaaaagcgctatttacttttaatttatgccttaacattactgtcgagtttagttgcagcacttttaatggcaacttattttaaaaagccaattcagcgtctattaaatgcaacaaatgagttaacaaaaggtaattatcaacaccaagttgtgattaaacgaaatgatgagttaggtgatttatctactcaattaaatcatttagctgaaattttacatcagcatgaagaatcacgacgtcaatgggttgcagatacctctcatgaattgaaaactccattggctgttttgcaagcgcagattgaagcgatgcaagacggtatccgaaaggcaacacctgaacatcttgatgccatgatgcgacaagtttcgagtttaaagaaattgacacaagatttggcagacttggctcaggctgatgctcaacaacttaaatgttatttgagttcggttaatccttgggaagttatactgcaagaagtcgaaaatttcagacctaaactcgaacaagcagggttagaaattgaggtggaaggtgaaggtgctactttattgttagaccgcgatcgatttaaacaaattattgttaatttgattggtaatagtattcgctataccgaaacaggtggaaagattcatattcatacaagtcaaacgcctcaggagtggactttatatgttgatgacagtccatttggtttaagtgatgagcaattatcacgtttaggtgaacgtttttatcgtgtcgatgattcgcgtacgcgtagtacaggtggaacaggactaggcttagctttatcttgtaaaattgcgcaggcgcttggtggtacactcagttttgaacactcaccattaggtggtttacgttgtgtactgacctttaaaaagcagagttaaataaaaggaaaaatggcccatgaaacatattatgttggttgaggatgaagtcgagttagcgcatctggtgcgtgattatcttgaggctgctggattcgaagtaagcatgtttcatgatggtcaggatgcttacacgagctttcaacaacgtaaacctaatttaatgattctggacttaatggttccaagaatggatggtttaacgatttgccgtaaggtacgtgaacagtcagatttaccgattattatggtgacggcacgtactgaagaaattgatcgtgtcttgggcctaaacatgggggcagatgattatgtgtgcaaaccttttagtccaaaagaactggttgctcgtgtgcaggccgttttacgtcgtttagaacgtaaggctgagccagagcaaaatgattctttccgtattgataaagcacagcaaagaatttggtatcaacaaaaatctttaagtttaacgccaacagaatttcgcctacttgagttatttttagaacatgtggggcaagtttattcacgtgcacaattattagatcatattaatccggacagctttgatgttgccgaccgagttattgatagccatattaaaaacttgcgtcgaaaaatcacggaagtggccgaaactggtaaccgtcatgagtggattcaagctgtttatggagtaggttaccgcttcgaatatccagaagaataattgcttagaaaagttatgctgtggataaccacaatgttatccacagaaaatgtggataaaaaattaagaagaacagctcaccgcgacatcaggtacatcgcttggtaacggacctaaatcttccggtttttccaaatctgattgctttgtatagggatggttgagtagcttaaataagcggtcaacctcactaaaatcatctcgctccgctgcctcaatagctcgctgtgccatatggttacgtaagatataaattggatttacctgctgcatgtttgcatcaagctcatcaatatcttgatattcacggatgttttgatactgcgtaaggaatgcatcaaattgtcgaatatcaaggcagtcatcacgtaaggctttgtattctttattttgaaggcgaatgaagctttgggtgtaatcgagctgctccgcttgcagaatacgcaaaaagcttaagccgcattcagtactgtctttatgaaaatgaggaagccccattttttgacacaacccagtggtgtaatgctcaataaaagtcggctcaaattcttctaaacaagcggccaacgcttctttgaactgctctttatgctcaggttcggcaagtggaatgagattatttaaccaagtccataagttccagtgcgcaatactcggttggttttgataggtgtaacgcccttggtaatcggaatggttgttaatccaatttggtcggaaacgttccataaaaccgtatggaccaaaatcgagtgtagaacccgtaatatttaagttatcggtattcatcacaccatgagcaaaaccgaccagctgccatttggcgatcataatggctgtatttctaatcacagctttagcaaaagctaaaataggttgctcttcttgttggcattctggatagtgccattcaatgcatttttgagtgaactcggccaatagctcaggtgcatattgattgatccattcaaaatggcctaaacggatatgacattcagatgttctaagtaacattgcgccaggttctagcttttcacgctgtacaccttgagtggagcttgtaaaacctactgcgtgactagaagcaacccctaaagcatttaaagcatgtcctgctaaatattcacgaataacagagcgtaaaactgctcgcccatctcccatacgcgaatagggcgtggggcctgcaccttttaaatgtaaatctatggtttggccttttttattaagaatctgcgcaatgagtaagccacgtccgtcgcctagttgaccggcccattgcccaaactgatggcctgcatacaccatagccaaaggcgggaattccgagaaggtacgctgaccactgcaaatttcaacccaagcctgtttttcttcatctgtccattgtaactcttcggctaaagctaaattaaagtgtccagcctttgcaccgcgaagcggagagggttgctggatatgaaaaagcttaggattgagcgatgaataaagcggattaaattgcataggctggactaaatatttgaggcaaaattcactataccatagttaaaaacaagccaaaaaaatagcacctgcaaagtatggctctacaggtgctatttcgggataaacacgtattagtctggtacgacgtttgtgttctttttaatgttacgcattaaagtttctaaacactcacggtgatgactcaaacgatgttcaagcaattggaaatcaacttttaacttgtgatccattttgtgaatcttttcagccattgctgctttctttgcttgtaactcttgttctttgagtttcgcccagtcatttaaagtatgtgtaaatgcttcatactcttgagcaatacgttgcttcatttgactaatgtcggcatttacatcatgaccataaatagccaagtcttgttcagcatatttaaacttcattgccaattctgcttttttaatattaaagcttggaatacgacgtaggttctttgctaaaccaatcttagagcatgtccagattagccattttgttggatcatattgccaccatttcacaccattacgatagtcgtactggaaaatatggtgatagttgtggtaaccctcaccccaagttgcaatcgctaaccagaagttatcgcgtgctgagttttcatcggtataagggcgtttaccgaacatgtggcaaagtgagttgatgaagaatgtaacttgatggctaatgattaaacgtaatagaccaccaagaagtacaacaccccataaatcgccagttgcccagccaaccaaacctaaaataccaacgtgaaccgctacgaccatcaaggcgtagtatttatgttggaacatcaccagtttgtcattgagtaagtctggtgcatttttaaaatctggttcagatggagaatgatcgcggatcatccaacccatatgggcataccaaaagccacgttcaattgaatatggatcttcatctacatcgtcgacatgacggtgatgggtacggtgaccagatgcccaaaacagaatactgttttgtacagcaaatgtgccgccaatcattaaaagaattttaagtggtaacgacgcttcataagcacgatgtgcccaaagacgatggtaaccagcagtaatccccatgctacttaaagctaaaagaaaaaataagcttacccatgcgcttacactaaaatcataataatacgcataaatcgggattatgattgcagcaagaattggtaaaccaattaaggtaatgctagcggtccagttaattggggccttgagtggggcggaagtcatatccggcagcgctcctagaaaccttgtcatacaaggtaaaaagacaaatcgacatagcaaaaccaatcttcaagatatattgctattttgcacatcatattagcacgtgcttagtgagaatcactagcattattgtacagatgtattgaaagaaccgtaacagaattaaaccatgcctgacaacatttcagataggagaagttgtgtaatgaaaatacagcgattgagaaaaaagaatagcattgatattgcaaggaaattgccattgaaatgtcttttcatcgcaatcagccttgtattggcagcatgtcaaagcacgccgcaacaaaataatcacaaaggccaagtaaaaccaacacatcgtgtacaaacgccagttgtgaaaaagaaagtaagtcctgatggtattcaagatatagattggcaaattacccagataaatggtcataaggcaaaattctttaaccagtggccgactctttcattgaactctacagtcaaaacagtaactggtcatacaggatgtaatcgtgtttttggtcgatacacttttgatttcagccaaaagaaacttgatatggaagttaacgcaggtcattcgagttgtgatggcgcgttggctcaagaagcagaattggtcgattctttacaacgtattaaacgcttccagttggtaggtaataccttatatctacttgatcaaagcggtcagcgtttgattcaggccgagaaaaaataaaaggtggtcaataccaccttttttatatttaaagagcttcaagcattgtggttggaatatctgtaattaagccctgaatatctaaatcccgtagtctttctgctctttctacatcgttcactgtccagacactaatgttcaaaccagcttgatgcgacaattgaatcatttcatctgttgcaagttgatcatgccagccaatatgacagcacccatattgatgagcaagttcaatcgccgttgctccaaccggaagttcaactaataatccgcgtttaaattgagagttgatatcacgtaaagcggttagaatttgaagatcaaaacttgtgatggtcacgactttctcgaaaccttgtaactcagtctcaagcttttgaattaacttttctgctaatgccatatctcttacagctttaacttcaacttcaatatgatcaaagttatcaagtaaatttaaaacgcctgtaagagtaggggttggttcagaggttggccagttaggccaattttgacgatgatcaaatgataatgcttgagccaatgttgattgctctacaatttggtcgacacctgccgtgcgcaaaaaattatcatcatgaatgacgaccaactcttgatcttgcagctgacgaatatcaaattcgacaccacgaatacctaaatttttaatgtgctgaaaaccacctaatgtattttcaggagcttctcggcgtgcaccacgatgaccaataatgcgcatagatttctattgtccgttctttttgataatgatctctttaaacgtagagatcattcttaacttaatctatttttaaatcatctcattaatatttttttgccaaaggacttcttgtccgccttcagcacgctgtaaagcacgcgatgcgacaaataaccagtcagatagacgatttaaaagttgaagggcagtggcttgaatattttgatcgcgagtttgtactgacatgagcgatcgctctgcacgacgacaaacggcacgggcttgatgggcataactgcaagataaagaaccagatggcagaataaattcttttagcataggcaaatcttcattcatacggtcaatttctttttcaagaaattcaatacaaacgggctgaagcaaattgtaatttggaatacaaacttcgccgcctaagtcaaaaagccagtgttgaatcagactcaagcttttgtcccaatcagctttattagccacttggctatctgtgatttgagcacgaagtaccccaataatggcgtttagttcatcaacatcaccaagtgccgcaattcttagatcatctttagcaacacgagagccatcgcctaaacctgtggtacctgaatcgcctgtgcgtgtatagattttgcttaaacggtgtcccatgatagatatcctgaacataaaaaaggggataatgtcggtcagaacattaccccgaaactggagttaagaaaatatttttataatcagattgagaaattaataacggaaagttacgccaacagaagcttggcggccaccgttgatataccagtattccggagagaatgaagattgagcattatatgcagtgttataacgtacatcaccaatattctggatgttcgtaaataactttatatttggattcatattccaaaaagcatttaaatcaacagttgcatagcctggaactttaactgagttttcaatattttgtgcgtttgctttagagcgagagactagagaagcattcaccccataaataccatcatcatagcctgcagttaaagtatatgtttgacggggacgataagggacatctatgtctttatctttatctctagcttctacataagcgtattcagcattaacaaagatattatccttagaccactttagacctatttcaccacctttcatatcagctttatttaagttgatatatgttgttctaccatttatagcaccataactaattaaatttttaacatctgtatagtagccagaaagataggcagaaataccataattaaatttctgatctataccaatttcatatgacttgctttcttcaggttttagatcagggttactataaaaatcatagccgtaagagccatatagatgttcaagggtcggtgctttgaatgcagtaccaatgttagtgtagatacttgttagaggagagatttgataacgaattgcagcttgtccaactgtatgtgtaccaaaccaatcattatcttcaactcggacaccaacctgagtatgaataccattatcgttatattgatgttgtaaataataacctgtagagctgatatctcttacagcttcaggagatgagctagcatcatattttgatcgattgtatgtaacacccgctaaaatattctgatttggtacaaaattccatttggcatttatgtccccttcatcagaggttgtattaaagtggctttgataaattatttgttcgattttatcaagatagtgagaataacgtgcatttaagactaaatcagaagaagccttataactagccagccaatttactagacgattttcaaaattacgttttgcattgttcgttgaatagttcgtagtatagttattcgtaccttgattttggtcaattgctaagcttgtgttaattacatcattactataaccaatttttgcattatatcctttttggtcaaatgctgctttttcacttttatcttgtatattgataatactagtaccatcagtttccatccgttgaccaccgatacttgcataaaaaccactgtcatctacataatcggcatttacaagtgttttataagtacggttttcaccatacacacctgttaaacttgctccagattttgttggattattggaaattaattgtactacgccactaatagcatctgaaccatattgaacagatgctgggccttttaaaatttcgatttggtctacatctgataggttaataaattcaggtgaaacagggcctaagccattttgagtatttaagcgagcgccattttttaataataatgttgagcccgtttgtccaccgcgtaaagataggtctgtgagctgaccaacgccaccagattgctttatataaatagatgcatctttttgtaatacatcagataaatttaaaacaggatttttttcaatttcttctttagaaattacagaaatacgcgctggaacttcactggctttttcagcactttttgaagcagtgataacaattgggtcaagctgagttgcatttgttgcatcttcagcaaaaataacaggtgaacaccccatcgcaatagcgatagcccctaccagacgagtaggttgaaaagatttagacataacatgctccatacattcaccccacgtgaatgatcgggtagatagatgaaacaagtaggtctccggacttcagcgccataattcatttatggacatattcaccttcccacactactgcagtggtgtaagtcgatttcgacttaaaaaatatgctttacattgttaccgttgcgggggcagtgccggactttcaccagcttccctaaagcatgaattgcttacacttgcttccatttgaacgcagtataaagtgccgaattacttcgtacaatgtcatttaaagcaattccctgagaacttttacgcaaggggcaaaaattgcattacaatggcgcttattttaagaaatggttgtagtttaaacagctcatgagccaatcaaaccaaaaacgtacacgagcaaaaatctgtggaattactcgcaagcaagatgttcaggcagtagttgtagcgggagcagatgcgataggctttgtttttttcctccgagtccaagaaatgtaacagttgaacaggcagaagaattagcaaaactcgttccgccttatgtacaaatggtgggtttgtttgtaaacgcgagtgttactgaaattcaggatatacttgattgtgttcccctagatgtattacaactacatggcgatgaaactccagaacaatgtcaggaaatagcgcgtcattgtaaacgtcgctggtataaagcgattcaggttaaacctgatctggatgtaattgctgaaattcaaaaatatcaggcagctggtgccagtgctgtattgctcgatgcatggcatcctgagcttaaagggggcacaggacatcagtttgactggtctaaattcccgaaacttgatattccattaatcttggcaggtggtttaacccctgacaatgtcattgacgctattcatactaccggtgcttttgcagtagatgtgagcggaggcgtagagtccgcaaaaggtataaaagaccaacaactcattgaacgatttatgcaaggagtccaacgtggatcagcaaaataatgtgattgactatacccaattcccagatgcaaatgggcatttcggtatccatggcggacgttttgtgtcagaaactttaatggcggcattagaagatttggaaaatctctattcccgcatgaaaaatgatgaacagtttttggcagaattcgaccgtgatctcgcctactatgtaggtcgtcctagtccactttattatgctgagcgatggtcaaaagagttaggtggtgcgcaaatttaccttaaacgtgaagacttgaaccatacaggctcacacaaggtaaacaacacgattggtcaggcactacttgcaaagctttctggtaaaaaacgtattattgccgaaactggtgcaggccagcatggggtagcaacagcaacaattgcagcacgtttaggtcttgaatgtgttgtttatatgggtgctgaagacgttaagcgtcaagcgatgaacgtttaccgtatgcgtttgttaggtgcaacagttgtgcctgtgcaaagtggctctaaaacattaaaagatgccatgaacgaagcgatgcgtgactgggtaaccaacgttgatacaacatattatgtcattggtacagttgcaggtccgcatccttatcctcaacttgttcgtgacttccaatcaattattggtcgtgaagcgcgtaaacagattttggaacaagcaggtcgcttaccagatgcattagttgcttgtgtaggtggtggttcaaatgcaatgggcttgttttatccgttcttaaacgatgccagtgtaaaaatgtatggggttgaagctgctggttttggtattgaaactggtaaacactctgcgcctttaaatgcgggtcatgtgggtgtattacatggtaaccgtacttatttaatgagtgatgaacagggccagattattgagacacacagtatctcggcgggccttgattatccgggtgttggtcctgaacatagtttcttgaaagatatgaagcgtgtagagtacgtgccgattaatgatacagaggctcttcaaggtttccgtgacttaaccaaaatcgaagggattattcctgcgcttgaaagctcgcacgcgatggcgtatgtctctaagcttgcaccgacgatgtctaaagatcagattattattgcgactgtttcaggccgtggcgataaagacttaatgacagttgcacgcattgatggcgtagaaatggtcgagatgtaagaggatacaatgccaagcttgtttatggtgatgttgggcgggcgtcatgcacgtgctaatacagaagttcatgatgtggtcatggctgtaggagatactttggaagaagtttatcctcaacttaaacaagcttggtttggtgaggctcaaggattacatattgatgcttgggctaagctctcaggagttagttctcaaggacagaactatcaaattcattttacagatgctgctccacaaccagatgatttaaagttatatttaattaatctaggtggatataatgcaagtgaattcggtgaacttcatcgttatgagtttgtggtggcacccaacacggtagttgccaaacaattaggtaaacaatttatagatcggcagtggcaaaaagcacatacagaccgggtcattgatattgatgactgtttagcgatagattgcgtggcaggccgttatattcatttaataaaaggcgattttgctgcaacaatttgggaaaatacatatttgactgtgggataggtcatttgaaatctaatattcatatggaagtgggtaaatggatttaattcaagaaaatggacagcctcgttatgggcgttttgaatctgtaccgtccaccattcatgtccaacgttatatttataaaactccttatggcaaagtcctaaaaggctggcgcaaacaattaaaatataagaaatttaaattttgtggcattcaacataaacattatagtattggtctggcaattgcagatattggctgggtcggacacggttttttctatatctatgaccatgaaacagggcaagtcattgagtggaatgctattcagccgttaggtcacaagacgtatcttgatgaacagcctttgtttaatcaaagttatttttctaaatcgccttatcagtttgatattcagcatgccaatggtgtgcgatacattcgggtaactaaatatggggaaatttgtctgagcgcccgtattttctgcgccggaacagatattttaagcttgtgtacaccaacaggtatcaatggttggacctatacccaaaagcagaccactttggctgtagagggaatgttcattaataagcaaaatcaagttgtacaatttgatgaaaagacatttgcttcacttgatgatacttgcggatttttacgtcctgaaacagcttggttctggctctcatgtaacttctgggatgaacaggggcgtcgtattgggttaaatctggcctctggtgttaatgaaagctttggtaatgaaaactgcctatggattaacggagttttatttccgctcacagacgttttatttgaaaaagtaaatgatgaactttggcaaattagttctctaaatcaaaaacttaatctacaagtgcatattgggtggtgccgatatgaaaatataaacttaagaatgattggcagtcagttcaatcaatggcaagctaaaattagcggcacgattgagcatcagccaacagatataatcaattgcaaagaacaatacggtttactagaacaacattatgcgaaatggtaacaagcaggttataaacctgcttgccaaaatgcttcacccgctgcaatagggtcatttgttttttccaaagtttcaatccaaacaggatactgacgaataacaggatgctggcttggatgaaaatcttttttaaaccaatccatatattgttttttcatagctgttaatgtgccatttttgccaaagaaccaaggtaaacctttaaggttcatcaaaagtctttctcttggactgaagccatcacatttcaacatgatattggtacggtaaagcgtaaaaccgaacatgagtacggttgttaaaacaagcacaaagcgacgtgttgactctggaacttctcccacctgtttcatgacatcaaaggcaacatcgcggtgttccatctcttcaatggcatgccaagcaaacagtgctcgaacataaggataagcgttttctaaagtttttttatggctataaaaggtttctgccattaacgctgttaaatgttcagcggcagcggtcatggcaatattatattgtggtgaacgttttgttagttcaaagcggaaaatctttttaagggtggtcgtgaactggtcaacaggcatgccttgctctttcatgagctgattcattttgtcatgtgcaataccgtgttgagcttcttgtttaataaaatccgcaactcgtttttgtagttcaggatcatcaattttatcgcggaacatacgcacacattcaatgaagtaacgctctccatctggaaaggttaagctgagtgcatcaaacatacgagttaaaaaagggtcattgttaaaccaaaagcgaggtgcttcgtttaaatgaaaatcgagatctttacgaactactggttcgacctgataagaaacatgtgcgttcatcttttatttctcgcaactataaccttttcattagtatgtcgcgagtggtcggctttgttttgacagttatcgccaatttttatacagtttgcgacaaaatggcagtaaaaaggacgcgccatgcaagaatttactatctcaaatggttacttctacctttggaatacgtatttaaaagaaaagggaatagattggcagacacttaatttaagtgaaattcaaacacgtcaagtccaaaatattttatctgcttctatagatgctcaatcttctttagacctttttattgaacttttagagataactgaaacgcgattacatgtgactaatttggctttagagatggcagcctgtattacccctgccaactttggggtcttgggttatatggcgtccagaagtgataccttaggtcaagtggtggagtatattgcaaagtttcatcgtttggtcattgatggtgcacaggttgtccctatacaaattgaacaggatgcctccaaaattcgcctatattggcctttggtcgacgacagtaatattctactaagtgagctgaccttggccgcaatggtacagcttgctaaacagatcgcccctttacatgagtttcttttacagcatgtagagttcgtacaccgagcgcgtggagcagtggttcactatcaacgtttctttcagtgcaaattatcatttgagcggccttactatgcattaacttttgcaagtgaaagtttaaatgttcgccctcaacatgcagacccaactttggtgcaacttttggtgaaacaagctgaagaagctttagttcagcggaaaatacatgccgatttagttcagcaaatacattggatcgtacaggaatactttaagcataagcagcaagcgcccaaaatagaagatattgccatcgagctgaatgtttctgttagaagcttgcagcgccaattacaggcattaaacacttcatttaaattaattttagatgctgagcgtatgaaacgctgcgagatattgttaagacaaaatgaaagtctgactgcaattgccgaccagttaggttattcggatcagtctgcactagcaagagcatataaaaatttaacagggcaaacattattaactcgaaaaaagcaattacagctcatccagaaaaatgcaacgaaatagaattttagatgcttttttgctcaatttgtaaatcaataatggcccaaaaataggaagctttgatcattgagaaaagtttcaaaatattgataaatgtacgccatgggttgtatgaatcatacaatcgaatatcgccataacgttagacctgttcaatgaacaaaaaatagcgttaaaatgcggtgttcttgtatttctacaaacaactcctcaattttaaataattcaaggaaagcacaaccctatgtcacgtcttgccacccgttttgaaaagctgcagtcccaacaacgtaaagcgcttgtatcttatgtcatggcgggtgatccacagccacaagtaacggtgccgttacttcataaaatggttgcggcaggagtagacgtcattgagcttggtttaccattttcagacccgatggctgatggtccggtaattgcacttgctgctgaacgcgcacttgcggctgggacgaacaccttagatgcgctgaacatggtaaaagagtttcgtgagcaggatcaggaaacacctgtagttttaatgggttatcttaatcctgttgaagtgattggttacgagaagtttgtttcttatgcgaaacaatgtggtgtagatggcttattacttgtggacttaccaccggaagagtcaaaagaatttggtgcaatcttgaaacaacatgatatggaccagattttcttacttgcaccaacttcaactgatcaacgtattcaacacgtagcgaatcaggcaagcgggtttatctactatgtttcactcaaaggtgtaacaggtgcagcgactttggatacttctgaagcggctgcacgtattgaaaaaatcaaaggtatgactaacgttccagttggcgttggtttcggaattagtgatgctgcttcagcgaaagccatgggtagtgttgcagatgccgtgattgtaggtagtgctttcgttaaatcttttgcaacgttggcagctgatgaagctgttgaacagacggtgaataaagtcaaggagcttcgagcagcgctcgatgagttagtatgaatcaagaagtgaaatcagggaaagttcttagcccttcgacgccatggacacagcgtccagttccaggtattgaagttgcagatgagcaacagactctcaaagcaacatttactgagccaactattgagtgccctgaatgtcatgctttagtgacacgtacagcaatatcttttaatgcgtatgtatgtccacagtgtgacgaacacttacgaatgaaagctcgcgatcgcttaaactggttcttcgacaatgttgtggctgaattaggtcaagagtttagcgcgaaagacccattaaagtttgttgatagcaaaccatatccagaccgtatgcgtgaagcgcaaactaaaactggtgaaacggaagctttaattgccatgcaaggtaacttaaatggcgtagatatgattgcatgtgcttttgagtttgactttatgggcggctcaatgggtactgtagtaggtgaccgttttgttaaggcagctgaacttgcaattgaaaaacgtcagccattaatctgctttgcagcttctggtggtgcacgtatgcaagaaggtatgttgtcacttatgcaaatggcgcgtacttctgctgcaattcaaaaattaaaagatgcaggcttaccttatatcgtggtgttaacacatccggtatatggcggtgtaacagcttctttagcaatgttgggtgatatccatattgcagaacctaaagcaatgattggctttgccggtaaacgtgtgattgaacaaactgtacgtgaaacactagaagagccgttccagcgtgcagaatatctgcttgatcatggtgtggtcgatcagattgttcatcgtcatgctttacgtgatactgtatctcgtcttgtatcaaaattgatgaacttaccttgaaacaacaagctccactttcaacagactctttagatacatggctcaattattggagccatgttcacgttacagggatcgatcttggtctggaacgtgttattcccgtagcagaaaaattaggcatgactaaacccaatgccaaagtttttactgttgctggaacaaacgggaaaggttcaaccacaacaacgcttgcgtctatattaaaagcacaagggtacaaagttgggttgtatcaatcaccgcatatctatcgttttaacgagcgagtcaaattaggtggagttgaagttgatgaccaaagcctgattgatgcttttgtacaagttgatcaggctcgtcgcgagtgtgatttaagcctatctttttttgaagcaaccactttggctgcttttgttatttttaaacagcaacaatgcgatgtatgggttcttgaagtcggtttaggtgggcgtcttgatgttgtcaacgtaattgaccctaatatcgccgtgattaccaatattggcctcgaccatacagattggttaggcgataccatcgaaaaaattgcttttgaaaaagcaggtattatccgacctcatattcctgttatttttgcaggtgagcaatctttgcctcaagcgattcaagataaggcaaatagctcacaagccacgctatacgcgattaatagagattatttttataaactcgccgatgatggaaaacattggtattttgcaagtgaaggaaccactttaaggttgccgcttggtacacttgcaatcgagaatattgcaggagcagttgcggccgtattaaatagcggacttgaaatctcgcaactagcgctagaggagggcattacaaatgcccgcttggctggacgcttcgaagtgcgcgaagttaatggaaaaaccattatttttgatgccggacacaatcctcatggtgttgaatttttgttaaagcaattgcgaaatttcttagaatacaataaacagtacacagaagttgtcgcagtattttcaatgctggcagataaagatataaaatcagtagtcgatttgttgaaacctactgttttacattggaaaattgctgagttgaatgtgccgcgtgctgcaccgattcagcaattgaatgacgccctgcaaggccagacaatacaacaatttggcaatatcaaagaggcttttaaatcagcgcttgagcaaacaaataacaatcagctgattttagcctgtggttcgtttcatactttagaagcgatttgggagtatttggaagaatgtcaatgaataacaaacaacgctggatgggtggcgttgttttattaggtggtggtgttttattggcagcattacttctaaaaggaaatgaagaaataaaacaggtagatgttcaaccccaaacgtcaacatcaccgaaattacaagctaaaccaaagcaatcagcacaagaagggcagatggtacagctacagccacttgcagttgatgttgaaacagaaaaacgtcttcttgaagaacagcgccgttctcgtgaaaaagctgtagcagaacaagaggctcgtgctgccgaattcttggcaatgcaacaacaagcagaagcggatgcagctcgtaaagctgctgctgaatatgccgcgattaatgctcgccgagctgctgcacaagaaagttccgataatattcctcctgaagtcgcgggtagtgagaataaggcaaaaggacagcaaactgatacaaaaaagtcagtagatctggctaaagcggatgcagataaaaaagctgctgaagcgaaacgcttagctgaggcggataagaaagcggctgaggcaaaacgtcaggcagaagcagacaagaaagcagcagaggctaaacgccaagcagaagcagataagaaagcagctgaggcaaaacgtcaggcagaagcggataagaaagcagcagaggcgaagcgccaagcagaagcggacaaaaaggctgctgaagctaaacgtcaagcagaagcagataagaaagcagctgaagcgaaacgtaaggcagaggccgagaaaaaagctgaagcagagaaagcacgtgagttgcttgaaaatggtgataaaaaatggatggtacaggttgcattggctgctaaccaagcaaatgcagatgctgtagtctctaaattacgtgcaaaaggctataaggtcacgacgagtccaaccagtaaaggtatccgtattatggttggtcctgcaaaagatagagatacggcagatactacacgtaagaaaattacttctgacgccagtttaaatatgaagtcagcttgggtgattgactgggtgcctttagatcagcgtaagtcagattaattttattctgaaatctaattaagatggattcgacagttgctgttgaatccattttacattttcaggggtaaataaacggtcaatattcttccaaataatatgataaccataacccccttgtttcatttctttcactgcatcatcaattgcccagttttcaaaaataattcgatacatggcgacgctggcccctgtacggtctgaaccatgatagcaatgtagtaaaacacgttgattattttgcttggcaagttggatttgctgcataacttctaataaatcttgtcgatcaattgcccatgtattaatcggaatatgaacaagattaaagttttcatttttaaagactaaatcatctgatgctttggctcttaagttaataatagtcccaatttgatggtgttttaattcgggaatcattgctgcatcgggctgttcactccggaaaacatcattgctaatttgataaaaattatgagtttgagaaactaaggttccccaatcgtgaggtctgtgctcatgggcaatactttcgtgttgcatacacccttgaaggcttaaacagaccgcaaatgcaatgagcgaaaattttttcatgtttggtaccgccgaagctcatgggggtcatgtgcacaaatgatctcaatcgttggctcatgttgagccagatgctgtaatttttttaggttaataagacgcttttcattatcttctgcaaatgtcttttctagaaggctaagagatcttaatttatttgctggatttagctctaggtgtgagtagtaagcatctccacaaaataataaccattgattttgttgttttatcgcaataccacaatgtccagcagaatggcccaataatggcaccattaaaatttcatcttgaaatagggggaaaccttttactttttcaaggttaaaccatttttcaccttgttgatactcaacaaagttccagtaccgatgttgtttatattgattagttctataacgaagcttacctttaaaattaggtagttgcgcagcattgtattcagtagctagcacatggacagtggcgtgaggaaagtctgaaattccgcctgcatggtcaaagtcgaggtgagtcacaaaaatgtgctgcacatctttaggatggaaacccagtttctgaatttgttggatagcactgaactcaagattcggttcaattttccccaaccgtttgactaaagaaccaaggcgctgttgcatgtgtagataatcttgtaggccaaatccggtatcaatcagtacaaggcctcgatcagtttctaccaaaagacaatgacaaacaatttcagctttccagcctttctgcccaaataaaggtgcacatacagggcacatactgccgcattttaaatgatgaattttatggatcatgatttttgttttttgcacaaactcttgggaagttataactgatctcaacagtaaaaaccatgtgtattcattaatgtaaaaaaaagccatcgggtgagatggcttttgagatggaaatatttgtttatttacgtgaactggctgatttagaatttttttaatatttgcctacgcactttgcttgtcttgcaggggacctttcagacgcttgcctacgcactgcgtttgtcttgcgcttcgattaaagccttgttaaaggctttaatcttgctcaggctgtggcgtaaggcgtaaataaggtttcaccgcagtataacctttagggaagcgttgtttaatttcctcttcatcttttaaagaagggacaatgaccacatcttcaccttgttgccagtttgctggtgtagccactttatgcttatcggttaattgtaatgagtcaacaacacgtaagacttcattaaaattacgaccagtcgaagcagggtaggtgatgattaaacgaacttttttatttgggtcaataatcactaaagaacgaacagtaagggtttcactggcattgggatgaataaaaccgtatagctcagatactttgcggtctttgtcagcaataattggaaaattgactgttgtattttgagtttcattaatgtcattaatccagcctttgtgcgactcaacatcatctacagataaagcaattgctttaacattacgtttttcaaattcatcttttagttttgctgtataacccaattcagttgtacatactggcgtatagtcggctgggtgtgaaaataaaatgccccaactatcacctagaaaatcataaaaattaatagtgccttcgcttgattcttgttgaaaatcaggggctgtgtcgcctaatcgtaatgtcatgataaatcctcaattgcttaaaatttgttatatgttgaaatgactatgccgcaatttatttattattaaaattattgtttttatattttattatgaactttttatataagtgtaaatatatatgaccaaaacatatgaatttatgggctgaatcaatgtaactttaagataaatttgctaaattagatttctcggaagttgtgctcaatagatgagcattaatgtcgagtttttaggtgccagatgctttaaaggggcttagaaaatgggtaaaaccatttgtctaatgatcagattttttttatgggttttgtgcaaaccccttgtacttcaaatttctgacaccataataaacgactgagaaaaaatttattcatttgaccaagcaagatttagagagtttatccatgttggcaagtctgatcggaggtatcttcggtacaaaaaatgagcgtgaactcaaacgcatgcgcaaaattgttgagcaaatcaatgcgctcgagccgacgatatcagctttaagcgatgcagacttatctgcaaaaactccagaattcaaacaacgttataacaatggcgaaagtttagataagttactccctgaggcgtttgcagtttgtcgtgaggcagcaaaacgtgtaatgggcatgcgccactacgatgtccagttaattggtggtattaccttacatgaaggcaaaattgccgaaatgcgtaccggtgaaggtaaaacccttatgggtactttagcgtgttacttaaatgcattaagtggtgaaggcgttcatgtcattactgtaaacgattatttggcacaacgtgatgctgagttaaaccgccctttatttgaatttttaggtctaagcattggtacaatttattcaatgcaagaaccagcagaaaaagcagctgcttatctagctgatattacctatggtaccaataacgaatttggttttgactacttgcgtgacaacatggtgttttctttagcagagaagaaacaacgtggtttgcactatgccattatcgatgaagtcgactcaatcttgattgatgaggcgcgtacgccattaattatttctggtcaaagtgaagattcttcacacctctatactgccatcaatactattccaccaaaattacgcccgcaaaaagaagaaaaagttgccgatggcggacatttctggattgatgaaaagcagcgttcagttgaaatgactgaaattggttatgaaactgtagaacaagaacttattcaaatgggtttgttagcggaaggcgaaagcttatattcagctacaaatctaaacctcgttcaccatgtttctgcggctattcgtgcgcacttcctattccaacgcgacgttcactatattattcatgacggtgaagtcgttattgttgatgagcatactggccgtaccatgccgggccgtcgttggtcagaaggcttacaccaagcagttgaagcgaaagaaggtttggctattcaacctgaaaaccagactttagcaacaactactttccagaactatttccgtctttataaaaagctttcaggtatgacaggtactgccgatactgaagctgcggaaatgaaagaaatttatggtctggacgtcgttattattccgacacaccgacctatgattcgtaatgaccagaacgatttaatctacttaaaccgtaatggtaaatataacgcgattattcaagaaattatgaatattcgtcagcagggtgttgcaccaatccttattggtacggcaacgattgaagccagtgaaattctatcgtctaaattgaagcaagctggtattcatcatgaagttttgaacgcaaaacaacatgagcgtgaagcagacattattgctcaggcaggtagcccgaatgcagtaacaatcgcaacaaacatggccggtcgtggtacagatattatcctagggggtaactggaaagcgaaacttgccaaacttgaaaatcctacccctgaagatgaagcgcgtctaaaagcgcaatgggaacaggaccatgaagatgtattgcaagcaggtggcttacacattattggttctgaacgccatgaatcacgccgtattgacaaccagttacgtggtcgtgcgggccgtcagggtgaccctggtgtttctcgtttctatttatctcttgaagatgacctcatgcgtattttcgcaggcgatcgtgtcgttgccatgatgcgtgcaatggggcttaaagaagatgaagcgattgaacacaaaatggtaagccgttctatcgaaaacgcgcagcgtaaagttgaagcacgtaacttcgatattcgtaaaaacttacttaaatatgatgatgtgaataatgaacaacgtaagatcatttattcacaacgcgacgaaatcttagctgaaaatactttacaagaatacgttgaagaaatgcatcgtgaagtaatgcaggcgatgattgctaactttattccaccagagtcaatccatgaccaatgggatgtggaaggcttagaaaatgctttacgtattgatttgggtattgagctaccagttcaagaatggctagaacaagatcgacgtcttgatgaagaaggcttggttgaacgcatcagtgatgaagtaattgcgcgttatcgtcagcgccgtgcacaaatgggtgatgaatcggcagcaatgcttgagcgtcatttcgttttaaattctcttgatcgccattggaaagatcatttggctgcaatggattatttgcgtcaaggtatccacttacgtggctatgcgcaaaaaaatcctgagcaggaatataagaaagaagcatttaacttattcgtgaacatgctgggtgtaattaaaactgatgttgtaactgatctgtctcgcgtacatatcccaacaccagaagagcttgcagaaatggaagctcaacagcagcaacaagcagaagcaatgaagctttcttttgaacatgatgatgtggatggattaacaggtgaagtgaccgcttctcaagaagcacttaatgattcagctactgaacaacaaacgttccctgtacctgaaagtcgtaatgctccatgtccatgtggttctggtttgaaatataaacagtgtcacggcaaaatttaatttgtgttataaaaaaaagcagaacgtttgttctgcttttttttcgtttgtagtaagcctgtgaataatgtttgcagttttaagcattaaatgctatttacttctcatccagagtgtatgttggaaagacaatgaaaaaagtattacaacctttatttttaactgttcttgctgtgccaagttttgttttcgcagcagaaacagcttcagcccctcaaaccacaacggttgataaagtacttgcggcaaaaggcccaacttcggctcaggctgtagtgaaacaagaaaatacgacggtgattagccctcgtacaggtattcgttacacattgggtaatacgggtaatcgcccaatcattttacaaactgctgcgatcgctccagcaaactctgcaaatattaaccgtattgttgcaagtaacccagctctatctccaaagagccaagaaaaagcaaaagttgcattaattggtgaagctgctgttgctggtgcggcagcagttgcagcgagtaatgtaactgctccggctgtaccaaacagtgttacacctgcaaatcctgcatcattgaactaagttctatataaaaaagccggtcaattttgacgcttttttatatcagggtgtttgaaaatatttaaatctgattatttacatctacattttttgtttcgcgtattaataaaaacgcaattaatgataaaagtgatgctgctgtaagataataaccaactgcatataaaccatatgtttcagcaagtttagttgcaataagcggtgcaaaagaagcaccaaaaataccagccaagttaaacgttaaagctgaacccgtataacgtactgaggttgggaaaatttctgaaaggacagtaccaattggaccataggtcaagcccataattgataagccagtacacaagaacaaaaacacaatgagtgtgtttccagactctaacatactagagaaaaacagtccgaaaattgcagcagcaatacatacaccaatagaagtagctttacggccaaatttttctgcaaaaatggcagaaagagggataaaggctgcaaagcaaagggttgcaaacaattgaagttctaagaactcaccacgcgcatagcctagtttggttgttccccagttaagtgcgaatactgtagttaaataaaacacaacgaaggtacagattgctgcaattgtaccgagaataagtttgcccgtgtgttttgtcaccacttctttaaatggaatattaacttctttttgcttatctaaaaccttctggaaagcaggggtctcatgaagttttaaacggatgtataagccaacaataaccaagacagcacttgcaataaaaggaatacgccagccccattgcatgaatgcttgctcaggaatagcagcacttagaagtaaaaatgaaccagttgctaaaataaaaccgataggtgcgccaagttgagggaacatgccataccatgcacgtttgccttcaggtgcattttctgtagcaagtaaaacagcaccactccattcaccacctaagcctaagccttgtcctaaacgacataaggcgagcaataacggtgcgacaattccaatctgagcataggttggtaataagccaatacatacagttgagatacccatagtgagtaatgctgccaccaatgttgctttacgacctatacgatctcctaaatgcccaaatagtgctgcaccgataggacgggcaataaaggcgattgcaaaagttgcaagtgattgtaagactgcggcactaccactactggcagggaaaaatagatgtggaaaaatgataacggcagcagttgcatagatataaaagtcgaagaactcaatggttgtaccgactaaacttgcaaacaaaacccgtgttttcgaattggtggctactacaggagcagcagtcgcagaggttgactccatataagtccttatatcagttaaaatttatttttaatttactattctctttaaaggcatatttttcttaaaagaatagcgtgaaagaacatcatccatgactctttcaggatcactgaatatgagtgaaaaatggactaaacaacgtaccaatagatagcaagaaagtgtgcacctgcacctaaaagcacaaaaatatgccatatcgcatgggtatatcttaccttttttaacgcgtaaaacaatgctccaacggtgtaagctaaacctccagtaatcaataacatcaaagtatctttgcttaaataagttcgcatatcatccattacaaaaacggcaagccaacccataagaacataagcaagtagcgaaattttctgaaaacggtgaataaaaactaacttgaaaagtgtaccaattgcagcaatgctccagagcgcaataagtaaaatatgagctttttgtgtaggtatagcaatgcttaagaacggggtatatgttccagcaattaaataataaatagccgtgtgatcgagttttttataccagtaacgtaaattttgtgtttgtgcaaaatgatagagagtcgaactagtaaacacgagaattaagctaaaagcatatacccataaacctatccactgggcagtggaaagataagatccttttataattaaaaagacagaggcaattactgccataaccacaccagcgccatggctgtaggcattaaaaagttcttcttttgggtcgtaggtttctaacaccgatttactcataagtttattttttgattaaaaatacaaatgtatagaaatacaaaacagtcgtaaagttattttatttttaatcctataccctttaaactttcactttatatgagtcaccattttttaggtatatcagtgtcggttttctcctttgagcaagaacagcaattctttcatgaaatcaaacaaatgcttaatcagcagacttttgaacgtttgattttgagccaatataaaggagagttgacacagctggaaaaaattactttccgtgttgtggagctacatggaaaaaaacaactttccgcgctatatcatcataccacccaagatgtgactaaaaattattcattcgaagatggcttagaacagatgcagtgctgattacgcaatgcaaacaagcgaatttatttgccactcatcaagaaatccagcttaaaaaaaataagaaaaaagccatgcttaatatgggtaaaaaacacagcgtgactactgctccaactgtacaagcgcatgatcgtgagaaacagcgttatgtacagcagggtagtgcatttttaaaagagcttggcattaccgatgagaaagctcaaatcattccaagcatggctcgtaaatggaagcagattaataaatttatcgaaatttttgcgagcgcatatgagcagattgatgctgagcaaaaagagttaaatattgtcgattttggttcaggaaaagggtatttaacttttgctttgtatgattatttacaagaacaacaaaaggttccgctcattacgggtgtagagctgcgccgtaatttagtggaattttgccagaacgttgcagacaaagtacattttaatcatttagacttttttgaaggtgacgttcgtagttatcagccggaaaagctggacgtgatgattgctttacatgcatgtgatattgcgactgatttcgctatccatacgggaattcgtttaaatgcttcaatgattatgtgtgcgccgtgctgtcacaaagagttgcgtccacaactacatagccctgaagttttacaaccaatgctacagtttggtattcatgcgggacaacaagccgagatgttgaccgataccttacgtgctttacttttaaaagcatatggctatgaaactaaagtttttgagtttgtatcgcttgaacacaccagcaaaaataaaatgattttggcgactaaacgcaaaaacgtgacacaacctgatgccaagattatggctcaaattcaagcattgaaagaaatgtatggaattaaaaaacagacattggaattgttattacaagatcagctgccgatcgaaaatattggctgcaaatgctaggaaggtgagtggatgtataaagttatagcgggtagttggacgcagtttgaggaagatgcaaaatacatccgtgaacaagtctttattcaagagcaaggcattgagcccaaagatgaatgggatgatttcgacagcactgctgtgcactttatggtgtatgacaaagagcagcctatcgctacagcacgtttgttgccacagcatagcgtagggcgtgttgctgttttaatgctttatcgaaagcagggtataggtaaaattctaatgcagcatattattgaatatgcgcgccaacataaattgccttatttaaagctttccgcgcaaacctatgtaacagctttttatgaagctctaggttttaaagtgcagggtgaggtttaccaagattgtggtattccacatattgatatgactttagcgttaagttgagattcctttttagaaatctcaactttgaattacttcatcgcattccagttttcgatggcttgtaagcctgtttccaaaccaacttcataactgtaacgaagctttttcggatttgtcgttaaacgccctgccatatttttaagaggcggtggacatacctctaaaatttgctgttcagggttactgctacgaacaaattcaactgaagcattataacgggcacagcggttacgcaaactatttgcaaaaccgtaatggtgtttaaaagcatatttcgcaaggaattggtcgcctcgactacttgctttaaagtagtttttcggacgagtgcgtaaaactaatagctttttgacaccactttgctgggctgtccagcggacaggtagggcatctgcaacgccaccatcaaaatagggttcacccataatatcgaccggatgacgggttaaaaccggaattgagctagacgcacgaagtgcatttaacaggttgtctttgccggcacggagatattcggcttgccctgttttagcatgggtgagtaccatataaaaatcagggttgctcgcaaaaagacgttgctggtcaagcgggtgctcttgctcgccaatttcccacatccattttaaatcgagtaaatcaccacctttaaagaagcgtttgtaatcgataaattcaggacgtagtgaatgatcaatatagaaggttaacgtgcgaccctgttggcctgccaggtagttagctacattggtcgaaccagaagatacgcccacatataaatcaaaagggttgaaccgttgttgtagaaaagcatcaagtacaccactggtaaaggcaccacgcatgcctccaccttctacaaccagtgcattgcgagaaaaatctgtcatttgaaaaatatctgattactgatgtgaatgctgatgttcttgcatgtccatttcaggcatattgtcatgctgagtttgctgatctgttgatttctcagctttttgctgcatttcatgctgttgagctttgcgctgtgctcctggcatatagtcaggctcattactcattgctaaatagaaaaagccaaggaagatcgcacttaaaacaccgacgattagaacaaatttccagcctaaaattgctgattcggaagaatttttatcggacataaggatatctcgaatgtgctgtagaagcacagaaatgaagtctatttatagcatatttaggtataaggctgaaatcttaaaggtcataaagaaaaacccatataaataaaatatatttatatgggtaaggtttatgcaatttttaaatattcaagagctctaacttattgaatattttgcttctgctctgctttagtttttagtaacgttggaggcgtgaagcgctcaccatatttggcagccaactcttcggcacgtttttttgctttatcaataccatattgatttaagaattgaatcgctcctcccgtccacggggcataaccaattccaaaaatagaaccgacattggcatcaatcactgactctaataccccttcttcataacaacgtaaggtatctaaggcttgtacaaacaaaatacggtcaatcatatcttgctcggagatatcatgatctttttgccaacgttttaagccttcccataggtgctttttaccattttcaggataatcataaaaacctgcgccagcagctttacctttacggtttaattcatgaatcatggtatgaatcacttcatctaccggtgttttcggtaactctttgcctacagcttgtagtgccttacgtgtttcacttgcaacatgctccgttaaagttaaagacacttcatcttgaatcgcaagtggtcctaccggcatgccagctttcagtgctgccatttcaatacgcgctggatggacgccttctgcaagtaagcgcataccttcttgaataaaagtaccaaacacacgactggtaaagaagccacggctatcattgacaacgattggcgtttttccaatttgctgtacaaagtcgtaggctttagcaagtgtctctgcggaggtatttttacctttaataatctcaaccaactgcattttgtcgacagggctaaagaaatgcaggccaataaatgctttatcatccttacttgcttgcgctaaacctgtaatcggtagggtggatgtatttgatgccattacaccattaggcgctaagtattgttcggcttcttgagtgactttcgctttgagctcttggttttcaaatacggcttcaataatcaggtcacaaccttgtaagtcttcagcagaagctgtggccgtaatgagcgataaaatctgatcacgtttttctgccgtcatgcgaccttgtgaaacacgtttatctaagagcttttgtgaatatgctttgcctttttcagcattttcaacagatacatctttaaggataacaggaatgcctttaattgcagtggcgtaggcaataccggcacccatcatgcccgcacccaacacgcccactttagtggcttgccattttgcaatatcggcaggacggctagcacccgacttaattgcatttagaccatgccagaaagtgccaatcatatttttagaaatttggcctgttgctagttgagtaaagtagcgagactcgatgcgcaaggcggtatcgacatcaacttgagcaccttcaactgcggcagccataatcgcttcaggagcaggatagcagcccttggttttgtcttttagcatggctggtgcaatagcgagaacttgtgcaactgccggagtttttggatcgccacccggaattttataacccttcacatcaaaaggctgttgagattttggattggctttgatccaagcaatcgctttatctaaaagttcttgttcattttcagctgtgtcatgaattaagcctaaagattttgctttatcgacaccgaactgtttgccttccattaaaaatgggaacgcattttgaagaccaagcagacgaaccatacgtacaataccaccgccgcccggtagtaaacctaaggtaacttctggtaggccaaatttacttttcgggtcattgattgcaatacggtgatggcaacttaatgcgatttcccatcctccgcccagtgccgtgccatttaatgctgcaacaactggaactcctagtgtttcaatcgttcttagatgaccttttaacttctcaaccatattgaaaaagtcagttgcatgctcaggttgaacttgaatcagttcatctaaatcaccaccagcaaagaaagttttttttgctgagcgaaaaataacacctgaaagttctgattctgctttaagtttctgggtgacctcatcaagcgagtcacgaaattctgcattcatggtatttgcagactgaccagttgaatcaagtgtcaagatgacaatattgtcggcatttttttcgtattgaattgcactcatctttatatatccctaaatttttatacacgttcaataatggtggcaatacccataccaccgccgacacagagcgttgctaaaccgcgttttttattttgacgttcaagctcatcaagtaatgtacccaaaatcatggcaccagttgcccctaagggatgacctaaagcaatcgcaccgccatttacgttgactttttcagcaggcacattgagttcatttataaaacgcattacgacagctgcaaatgcttcgttgacttcaaataggtcaatatcatcaattgttaaaccagctttttccaaggctttgcgtgcagcaggcgcagggccagtcagcataatggttggatcagtaccgactagggcagttgccaaaactttagcgcgtggttttaagttttgttctttcactgctttttctgaagccagtaaaacaagagctgctccatcgacaatacctgatgagttaccagcatgatgaacatgatttactttttgtgcttctggatatttttgcagggcaacagcatcaaagcccatttgtcccatcatttcaaaacttgggttgagctttgctaacccttcaagtgtggtattgcctttaataaattcatctttttctaaaatcacaatacctgcgtgatctttgactggcacaactgattgatcgaaataaccatttgcttgagctgccgctgctttttgttgtgactttacggcaaaattatcaacatcttctcggctatagccatctaaggttgcaatgaggtcagcgccgacaccttgtggaacaaaagatgatttaaggttggtttccggatctaacgcccacggtccgccatcagaacccattgggatacgtgacattgattcaacgccaccagcaaccactaaatcttcccaaccagaacgaactttcatggctgccatgttgaccgcttctaaacctgaagcacaaaagcggttaatttgcacacctgcaacatcatcattccagcccgctgcaatcgctgctgttttggcaatatcaccgccctgatcaccaattggtgtcacgcagcccagaacaatatcatctactttagttgtatcgagttgatggcgttgctgtaattcgtttaatagagtggtgagtaatgtgattggttttacttcgtaaagagagccgtctttttttccttttccgcgtggtgtgcgaatggcgtcaataatataagcctcgctcataacagttcctttttttattacttaaactttgtcgtgtttttgagtgtactgtttttaagagggagtgcaatgacgataagcgcaccagtcaggtgatgatttttgccaatggcgatacaaaaaagcccaagttgaacttgggctaaatgtgaaactaaagagatttaagaattaatggtaaccatggagctggcgatatagaccgggagtaacaccagtccactttttaaatgcacggtggaatgtactggtttcactaaaaccaacttgctgagcaacatcttcaagtgttaactcaggattgagtaataaatgaatcgcagcatctcggcgtaaagcgtctttcacgccctgatagcttttaccttcggcagctaggcggcggcgtaaagtttgtggagataaatacaacattgatgcaacgtcattgagcgttggcatttcttcaccaatttggcttttgagtacttcacgaatacgtgaagtcaacgaattggtatttttgaattttactaaaagctgagcaggggctgcttttaagaattcttctaatgttttttcatcttggcgaattggtaagtcaagataatcagccgcaaaggttatttcggtacgcggtgcgtcgaattgcataacaggcgcaaagaataacgcgtcatattcatctgcatgtgcaggacgtggatagctaaaatgaacacgttctaatggtaagcgacgttcaatcagccatgatgccaatccatgccagatcatgagcatactttcagtaatgaaatgatcgggatctaatgtttttggaatgagaggtactaaacgtgcttcatgtttgtcacgctccagcgttactgaccattcatcaccaaataatttgtaaaattgagatgaaagttcaagggcttggcccaaggtttttgcatgaataatcaactgacacataatggcaaaagtgcccaaacgacgcggttgtacatcgaaaccaacgtgttcgtcttgtgtgaccatccataacatttttataaaacgggtatattgttctggtgagattcgagctttaggttgacgtaatagttccgcttcgatacccacatgtgaaagtaacgtctcgacatccatgccaaggcgctttacgcctgtcaaagccgcattcacgaagtggatgctaatcgtatcgcgactcatattgaatccttcagtctctttgatgttcactttaaattgacctaaatgaccgtctaaaaaaataaattggcgatttacaacagtgtaaaagcactttttacatgttaaattgccgaaatgatcaaggtaaatggctgaacatgacattgttttagaatatttgcttaactaatataaaagaaaattcgaataatagtggttaaaaaaacgatgacgactgcattaaatggacttaaagttctcgatttctcgacgctcttacctggacctttcgccacaatgtatttagccgatatgggggcagaagtcatccatattgaatctccatcacgtccagacctcattcggattatgccgccctatgcaaatggacaggcgactgcacatagttatctaaatcgaaataagcagtcgattgttctcgacttaaaagatgctgcaagtattgatctgattaaagccaagatttctgagtttgatattgtgattgagcagtttcggccagatgtcatgcgccgtttagggctggactatgccacccttgcagaaattaacccgcgtttaatttattgttcaattacaggttatggccaaactggaagttataaagatcgggctgggcacgacattaattatttagctttagctggtattgctgggtatagcggccgacaagatagcggtccgccaccgcttggtattcaggttgccgatattgctggtggttcattacatgcagtcattgcgatcttggctgctgtagttgaacgcagccgtagcggtataggtcaatatattgatatttccatgacggactgtgttgcaagtctaaatagtatggcagcttcagccacgcttgccgcacaagttgaacaggctcccgagcaggggatgctcaatggggggattttctatgactattatatgacgcaagatggccgttatctttctatcggtagccttgaaccacaatttatggcaggtttgtctgcagcactagatttacctgtgttattacaaaaaggtgcgtcattagatgagcaagatcgacaggaagttaagcaagccattcaagaaaaaattaaagccaaaacattcaaagaatggcatgaaatttttgcaaatctcgatgtttgtgtagaaccggttttgagtttaagtgaggctttaaattcaccgttagcacaacaacgtggatggattgtgaatgttcctttgcaaaataatacgccagatacagaaccgcaaattgcatgcccaattaagttttcacgttcgcaaatgagatattcctttgtaggtcaaaaacttggcgaagggcagtggtgaggttaaggggctatttcttatacagtatgtattgaaattattatctgaataatcaattgattaacattttgaataatttctttacataaaattagcgtaacctttataaacaaagacataaaaggttcgtaaacatgaaaacgcataaatctttgatggtttcctgtttatccgttttatcaattactctttttgttcagcatgcacaagctgctgctgcatttgacccaaatggttcttggatgttgggtgattggaacgggcaacgtacagcgttgcaagcacaaggttatgatttttcttttggatataccggtgaatatgccggtattttagattccaaacaaacatctacacacggtagtgcttatacagggcaacttgctttaggttctcatttggacctaggtaaaattttagggtggcaagatacagaagctcaaatcacattaacttatcgtgatgggcaatcgctttctgaacattctccagcattggctgggcaccaaagttctgttcaagaagtgtggggccgtgaacaaacttggcgtttaacagatttatggatcaagaaaaaattccttgatcagaagttagatgttaaagtgggccgttttggcgagggtgaagactttaatagttttgactgtgatttccagaacttggcactttgtggttcacaagtgggtaactgggtaggcgatcagtggtataactggccagttagccaatgggcaatgcgtgtcaaatataacttgcaacctgatttatatacacaagtgggtgtatatgaatataaccctgaaaacttggaacgtggcaaaggcttcaacctaagtacagatggttctcacggtgcaattattccagcagaagtagtttggtcacctaaattaggtgtgcaaagcatgcctggtgaataccgtttaggttattactatagtactgccgatgccaaagaaattgcagattcaactaaaacatctcataagcagggtgtttgggtaactgcaaaacagaaattattccagccagctgatcaaactgaccgtggtttaacagggtttgtgaacctgactttccacgactcagataccaacaaagttgataacatgcaaaatataggcttagtctataaaggtttgctcaatcaacgtcctcaagatgagttggcacttggtgttgctcgtatccatatcaatgatgattggaacgatgttcaagccaaagaatacgacaccgaatataataccgagctttactatggtattcatgccactaactggctaactattcgtccaaatgtgcaatatgttcgtcatgttggtgcattaaaaaatggtgataacacttgggtaggcggtattaagttctcaactgcattctaagtaattattccgaaaacggattgtcgagggctaaatcattgattgaagtatcctgaccttccgtttttttctttatgcctgaattttgttttagacgtattggtgatgtcatttttctataagttttttggcacatctttccgataaaaatgatgattgataagaggtggtttatgaatcaaccttcttcaagatcaggtttaacgacttttaccgtaattattattgggttattggcgttattcctgctaattggaggtatttggctcgctacactaggcggttcaatttactatattgtagctggagtcttacttctcattgttgcatggcaactctacaagcgcgcttctgctgctttgtgggtttatgccgcattaatgctaggtactattatctggagtgtctgggaagttggaacagacttttgggcgcttgcaccacgtttagatattttaggtattcttggtttatggttattggttccggctgtaactcgtggaatcaacaaccttggatcaagtaaagttgccttatcttcaactttagcaattgcaatcgtgttgatggtttattctatcttcaatgatccgcaagaaattaatggtgaaatcaagacacctcaaccagaaactgctcaagccgttccgggtgttgcagagagcgactggcctgcttatggtcgtactcaagctggtgaacgttattctccattgaaacagattaatgaccagaacgtaaaagatctgaaagttgcctggacattccgtactggtgatttcaaaacagataatgactctggcgaaacaaccaatcaggttacaccaattaaaattggtaataacatgtttatctgtacggctcaccagcagttaattgcgattgacccagctacaggtaaagaaaaatggcgttttgatccgaagcttaaaacggataaatcgttccagcatttaacttgtcgtggtgtaatgtattacgatgcaaacaacacaactgaatttgcgacaagcttacaaactaaaaagtcgacttcaactcaatgtccacgtaaagtctttgttccagtcaatgacggacgtttagttgctgtaaatgctgacacaggtaaagcatgtactgactttggtcaaaatggtgaagtgaatttacaagaattcatgccatatgcttatccaggtggttataacccaacatctccaggtgttgttactggttcaacagtggttattgccggttcggttaccgacaactattcaaataaagagccatcaggtgttatccgtggatatgacgtaaacactggtaagcttctttgggtatttgatactggtgcagcagatccaaatgcaatgccaggtgaaggtacaacctttgttcataactcaccaaatgcttgggcacctttagcatacgatgccaaacttgatatcgtttatgttccaacaggtgtaggtactccagatatctggggtggtgaccgtaccgagttgaaagaacgttatgcgaactctatgttagcgattaacgcttcaacaggtaaattgatttggaacttccagacaacccatcacgatttatgggatatggacgtaccgtcacaaccatctttggcagatattaaagacaaatctggtaaaactgttccagcaatttatgtcttgaccaaaacaggtaatgcctttgttcttgatcgtcgtaatggtcagccaattgttcctgtaactgagaaaccagttccacaaacagttaaacgcggaccacagactaaaggtgagcattattcaaaaactcagccattctctgatttgaatttggcaccacaagataaattaactgataaagatatgtggggtgccactatgcttgatcagcttatgtgtcgtgtgtcattcaaacgcctcaattacgatggcatttatacgccgccatctgaaaacggtactttagttttccctggtaacttaggtgtgtttgaatggggcggtatgtcagttaaccctgaccgtcaagttgctgtaatgaacccgattggtctgccattcgtgagtcgtttaattcctgctgatccaaaccgtgcgcaaactgcaaaaggtgcgggaactgagcagggtgtacagccaatgtatggcgtgccttatggtgttgaaatcagtgcattcttatctccacttggtttaccttgtaaacaacctgcttggggatatgttgctggcgtagatttgaaaactcatgaagtcgtttggaaaaaacgtattggtacaattcgtgacagtttaccgaacttgttccagttaccagctgtaaaaattggtgttcctggtttaggtggttctatttctaccgcaggtaatgtcatgtttgttggtgcaactcaagataactacatccgtgcgtttaacgtaacgaatggtgagaaactttgggaagcgcgtttaccagcaggtggacaagcaacaccaatgacttatgaaattaatggtaaacaatatgttgtaattatggccggtggtcatggttcatttggtacaaaaatgggcgactatttagtggcttatgcattaccagataacaaataaaagtttgctatcaaaaaagcccggatttatctgggctttttttatgtcaatttagattaaagcttatcaataaaaccgttattaaatatgcaaaaaaagcattttattgatgaataaaagctcgctatgctatccgccttaataatgaatctactagccatacgccatgtatttatataccgatttcgatcagcagctgattaatcaacgagttgctcagttccgcgatcagacagagcgctatttagcgggcaaactttctgaagatgaataccgcccattacgtttgcaaaatggtttatatgtgcaacgttatgcaccaatgctacgtattgctgtgccgtatggcttaatgaactcaaaacaattacgtaaaattgctgaagtatcaactcaatatgaccgtggctatgcacacgtatctacgcgtcaaaatattcagctaaactggcctgcacttgaagatgtgccagaaattttagctgaactcgcaactgtacaaatgcatgccattcaaaccagtggtaactgtattcgtaacacgactactgaccagtatgcaggtgtagttgctggtgaaattgctgatccacgcccaacatgtgaattgattcgtcagtggagtacattccacccagaatttgcattcttaccacgtaaatttaaaattgccgtttctgcacttgaagaaaaagaccgtgcagcaacagcattccacgatattggtgtgtatatcgtgcgtaatgaagcaggcgagatgggctacaaaatcatggtgggtggtggtttaggccgtactccgattattggtagtgtcattcgtgagtttttaccacgtgaagatttaattgcttatttagaggcagttttacgtgtttataacttacatggccgtcgtgataataaatataaagcgcgtatcaaaatcttggttaaagcattaacgcctgaagtatttgcacagaaagttgaagctgaatttgaacacacacgtgaaacattaaaaattcagccagaaatcttgaaaaaattagatgaagagttcactccgtttgattatcaagatttagaagatgaagactttacagctttatttgctgagcatccaaaattcaaacaatggttcaatatcaatacgcatgcgcataaagtaaagggctatcgtattgttacgatttctttaaaacgtgcaggtatcgcaccgggcgatatgaccactgaagaaatgaacttcattgcagatctcgctgataaatatacgtttggtgaacttcgtacgactcacgaacaaaacattgctttggcagatgtacctcaaaaagatttgttcgatgtatggcaagcgcttgaacaacacaacatggctcgtgcgcatatcggctttattaccgatattattagctgcccgggtggtgatttctgttcacttgcaaatgcgaaatcaattcctattgctgaagcgattacacgccgttttgaagatttagataaagtttatgatcttggtcatttagacttaaatatttctggctgtatgaatgcttgtggccaccaccacgtggggaacatcggtattttaggtgtagataaaaaaggcgctgagttctatcaaattaccttaggtggtaattcagaccatgatgcttccattggtgacatcttagggccatcatttgcagcagaagccgtgcctgatgtcattgaagaagtattaaatacgtatcttgatttacgtactgaaggtgagcgtttcgttgatacatatcgccgtgtaggaattcaaccatttaaggagcgtgcatatgcttaatacagctctacctgtgctttataaagatggcacgattgcagataatacttatcaaatcattgctgaagatggtgtgattcctcaaggtgacgttgttttaacaacagcacagctcgatcaactggcgaacactcaaggtaaaaaagctttgtatgtgactgtaaatgattcaccagaagatcatacattcccacttagtgaacttgatgcaatcttcattgagttcgcaggtttcggagatgggcgaggttattcattcgctgcattattacgtcgccaaggtttccaaggtgaactacgtgcaacaggtgatgtatttaaggatgtcttaaattatttaaaacgttcaggttttgatagttttgtcatcaaagaaggtaaagatgtgcaagaagctgctgctggtttgcaagactttactcatccttatcaagcctcaacagctgtgccaaaagcaagttatcaaactggtgcttaaatagcttctaagtgaaaaggctgaactcaggttcagctttttttataaataatttttttaataactgaattgaagaataagaatgttcgctttaatttcaaaaataaatcctggcacttggtggttaatattcgctattgcaacggatgtactttcaaccttttattcagctaaaggcaatggattagttaataaaactgctcagggaattgctctagttttgtatattatctcttttgcatgcgctgctattgctttgaaatatatgcaagctggaattttatatgtgttgtggtctggggtgggggtattggcgaccgcttttctcgcaaagatttttcttgggcaaaatattgatgtcgcaggatggattgggattggttttattacagtcggcttaatgattattgcgcaatactctaatatcgatgtttaaagcccttatagaaacactgagatctctataagggctaaagatttaagtatctaactggcagttaaccatccatttgacaccaaattgatcagtaaaagcaccgtataaagcgccccagaacgttttttctagtggcatttcaattttgccatttacagataatgcatcaaaaagttgctttgccttttcttgctcatctttttcaaggttaattgcaatgtaatgattattgccctgagtaaatacactatttggtgtacagaattgatcaatgacatctgatgccatgagtacagtgtattcgttaatcggcagggaaacatgaagcactaaatttttttgagcttccgataacgtgacaccgtcatgaggcggcatatcgctatagcggctcagcatggcaaattcaccgccgaatactgatttataaaaattaaaagcttgctctgcctggccttgaaaattgagatagtgattgagttgcattgttattgtccattgttgttttcatttagaagaataagttaaaacggaaaagagattttgtgggtcattttttgtagttttttcataaaaaatcccaccgaagtgggattttaaaaaaggttttaattaaagaatttcgatggcaacagctgttgcttccccaccgccgatgcaaagagcagcgacaccctttttaccaccagtacgtttaagcgcatgaataagcgtaagaataatacgagagcctgtcgatcctacaggatgaccaagtgcacatgctccaccatgaatattgactttttctggatcaagtttgaaatcatcaattggacacatcgttaccatagcaaaagcttcattaatttcccaaaggtcaacgtcctgagcattccaacctgcttttttaagtactttttcaatagcgccaacaggagcaattgtaaattctgaaggatgttgagaatttgacgcagtggctatgatttttgcaagtggttgtaagccgcgctgtgctgcaacttcactcgatgttaaaactagtgcagaagcaccatcagaaattgaactcgcgtttgcagcagtaatggtaccgtcttttgcaaaagctggtttaagggatgggattttatcaatcttggcatttaagggttgttcatcctgatcgacaatgacatcacctttacgggtagaaacagtaacaggtacaatttcatctttgaaatagccttcagtaatcgcagtttgagcacgttttaaagaacgaattgcaaagtcatccatttgctcacgagtataaccacgtgtatttgccatatcttgagcaaatgaacccattaaacgtccagtttcagcatcttctaagccatcaaagaacatatggtctttaatttcaccgtggcccatacggtatcccgcacgtgctttgggtaagacataaggcgcattggtcatcgactccataccaccggcaactacaatttcagcacttcctgctttaatcatatcagccgcttgcattaccgccttcatacctgaaccacaaagcttattaattgtcacagctcctgttgaatcaggtaaacctgctttacgcatggcttgacgagcagggccttgctttaaacccgctggtagtacgcaacccataatgacttcttcgacatctgtaggctgtaaacctgctcgtgcgattgcttctttaattgttactgctcctaattcaggagcagttagtcctgatagtgatccttgaaaaccacccatagcagtacgagcaccattaacaattacgatgtcagtcattgttgtaatctccgattgttcttaatctcaaaataagaaatgtttaaaacctaagcagtatattgcaaaatgaagaacgggttagcttctgcattagactgtagagttctaacaatttttaagttcttctaagcgcacatggcccattttgctaagaattaatttaaagtttttaagctggtcataagaacaatagataaaactgccattcgactcgatgggtagtccagaactaccttgaaaaataatactattttgtttttttccaaaacgttgtaatttcatagaaccgtagtgatggttaagatctatagaggttaataactcttcatttaaatcatgctgtagattatggttattatctacaaagctgattacgcggttatcccaattcgtattgcagaccaattgatcagaacttggacaaagaacaacattcttatgcctaataattgcgtcatatttggctttttgtatatgaattgtgagtatacgcggcgtattttttagttctacagatgccataaattgatggtataaaggaatggctataactgacataatcacaagaattacgagtgttatagtgagctcaactatagtaaaaccaggagatttaaacattaaaaaaccttaatatatgtataaatagagcaattttatgttttctgacaatgatttatattattttttataatgaggaaacacaaaattaaataagggttatcagtcggctagaatactggtaaaatcacggcaagcgaaacaaagaagttgttcatatttgctagttgggtaaaaaattaccgaattacaacggaaattgtaagtaattttgtcaataatttacttgattaaaattatcaagcacttggaaagtctatcaagtgtttgtatgattcaaatgtgaatagcttaaaaataatactggggtaaaaaaatatctcaggggccaataaatttaggctgagcttgaacaacaattgttatctctggaggatatccatgaaattgagtcgtattgcacttgctactatgcttgttgctgctccattagctgctgctaatgctggcgtaacagttactccattactgcttggttacactttccaagacagccaacacaacaatggcggtaaagatggtaacttaactaattcacctgagttacaagacgatttattcgttggtgcagctcttggtatcgagttaactccatggttaggtttcgaagctgaatataaccaagttaaaggcgacgtagacggcgcttctgctggtgctgaatataaacaaaaacaaatcaacggtaacttctatgttacttctgatttaattactaaaaactacgacagcaaaatcaagccgtacgtattattaggtgctggtcactataaatatgactttgatggcgtaaatcgtggtacacgtggtacttctgaagaaggtactttaggtaacgctggtgttggtgctttctggcgcttaaacgacgctttatctcttcgtactgaagctcgtgctacttataatgctgatgaagagttctggaactatacagctcttgctggcttaaacgtagttcttggtggtcacttgaagcctgctgctcctgtagtagaagttgctccagttgaaccaactccagttgctccacaaccacaagagttaactgaagaccttaacatggaacttcgtgtgttctttgatactaacaaatcaaacatcaaagaccaatacaagccagaaatcgctaaagttgctgaaaaattatctgaataccctaacgctactgcacgtatcgaaggtcacacagataacactggtccacgtaagttgaacgaacgtttatctttagctcgtgctaactctgttaaatcagctcttgtaaacgaatacaacgttgacgcttctcgtttgtctactcaaggtttcgcttgggatcaaccgattgctgacaacaaaactaaagaaggtcgtgctatgaaccgtcgtgtattcgcgacaatcactggtagccgtactgtagtagttcaacctggtcaagaagcggcagctcctgcagcagctcaataatttgagttcttgaacagtaaaaaagcgactcgttagagtcgctttttttatggcgatttttaaaatatttggtcatttgtaaatctcctgattcataatctcttccaatcattacttaaaatagttaccaaacacctttcttcaattgctgtttagtatcttgtctatttctacgatgttgagcacgaggtttttctgtttcgtgcataccacctttgtgaagtagaggggatagagctacttgattacggaccttaattttcggcatttctttaattttcatgtcttaacctttaatacataaaacttgtttaagagtatgaacgacttcaatgagatctgcctgattggctataacctcatcaatatctttataggcacttggaatttcatcgactacaccactgtctttacggcattcaatcccttgtgtttgttcaatcaagtcctgctgattaaaaagaacttttgctttgcttcggctcattttgcggccagctccatgagaacaggaacaaaaagattcagggtttgctttacctttaacaatatacgagcgtgctcccatagaacctggaataattcctaactcatctaaacctgctcgaattgccccttttcttgtaacaaaaaggttttcaccaaagtgtgtttcttgactcacatagttatggtgacaattgattgcttctttcgtcatttgaaaagaaggtagaagagggcgaattgcttctaatattaatcgcatcatttctttacgattttcaaaagcatattcttgagcccactctactgcttctacataatcattaaagctttgtgagccttcagcaaaataacttaaatctttatcaggcacgtgcccaaagcgatgttgtgcctctttcttggctaactcaataaaataagtacctatgacgttaccaagacctcggctgcccgaatggagcatcacccatacatcttgattttcatcaatacataactctataaagtgattaccgccgcctaaagtgcccaactgtttttgccatgttgcctcaaactgacgaagcattcggacaagacccggatgctttttaataataggttctaagcgtttttcaagtggaataatgctagaagctttcgctttgacttgtttatgcaaagcaaatccaaccggcactttccgttcaatggcgtcccgcaagcgacttaagttatttggaagttgtgaagctttcaggctcaaacgaatagcattcattccgcagccaatatctacacctactgcagctggaataatggcatgtttagtaggaatgacgctgcctacagttgcaccttttccaacatgcacatcaggcataacagcaatatgagaatatataaattgcagttgtgccattttcttgagttgttcaatactttcactatctatgtcttgagtgaaaattttaacggggacaccatattgtgcctcttcgtttaatatcttttgtatgcccataattattctcttatttattgtccgaataggcataaaaaaacctagcgaatgctaggtcttaaattcgagcattcggacaagtgaattaaatttgtacacttgtccgtgagctgacatcgtgccaaatcgttactgtgttttaccttgtagtgttggcatgatgtcctccttttttaaaaagtgccgttgaaaatctgaacggcattttacctgtttttaactaaagatcaagtttttgacctttgataagcgctgattaattacttgaactcagtattaatcttgctctggttttacatccatttgatcgtaaggaattaatttagttttatttttccatttgtatccaagccagattactaaaaataaaggcaagctgatataagtagaaagtaagccaatccagtcaattttaccgcctaaaaccgcttggtagttttgtcctaaaataatgacagaacagaggataaaggcaaaccaaggtgcgaatgggaaaaacttagcgcggtatgcaagatcttctaatttataaccttgagcaatataacctttacggaaacgataatgcgaaattgcaatacctaaccagacaatgaaaccacacattcctgacatattgaggagccagttaaagacttgcttttctccgataaaagtcgttaagaagcagaatgcagcaatgaatgtagttgcatataacgcattcattggaacaccacgattatcgagttttgcaaaccattttggtgcacggccttgttgcgccatatcaaataacatacgggtagaagagtacatgcccgagttacctgccgacaaaatagcagtcaaaataactgcattcattaaacttgcagcaaaagcaaaacctactttttcataaagtaaggtgaaaggagaaagagcaatattttctgttgctgctgcttgtaataagtttggatcatcataggcaataagggtgccgataatgaaaatacacaagatatagaataataaaattcgccagaaaatctgtttaattgcaagcggaatcgtcttcttcggatcttttgattcacccgctgcaacacccaccatctcggttccctgaaatgagaacccggcaatcatggctaccccaatcatggcttgtaaaccacctacgaatggtgcctctttataagtccagttgccaaaagttgctactcctggtgtcaacataatcttaataatcatggcgataccaataataataaaggcaacaatggcaattactttaaccatggagaaccagaattcactttcaccaaatccttttacggtcatcgcattaatcataaagataatgacgagaaagagggcgctccaatagaatccgggaacatctgggaaccagaatttcataataaactgtacggcaacgagttcaaacgcaaccgtaattgcccagttgtaccagtagttccagcctagagcgaaaccaaaaccctcttcgacatagcgacttccataggtaaagaaagcacctgatgttggtgtgtgtgtcgcaagttcacctaaactggtcattaagaagtaaatcataataccaatgagggagtaggcgagtaacgccccacctggacctgcatttgcaatggttgacccagaagcaaggaaaagacctgtaccaatggaaccaccaatggcgatcatattcagatgacgagccccaagcttacgctggagtttttcaggagcatgtgtttcgctcatggagattccttacatagtttgttatgcacaggcatataacaccttaaagccttgaagatcagttttaatctcacactgaccaaagtgcttctcaattaagatcggatagtttaaaaaacggttcgctacaatccatagctcgcctgatgcctttaaatgttttttagcgttctggcagagtccttcacttgcatcatagttggtatgaataccctgatggaagggaggattactgacaatggcatcaagttctgttggggcgtctgcaattcctgtaacaggctgcaatctcaactggtctgaacctattccatttcgactaaaagtcatttccgttgactgtaaagcgaaggcatcaatatctagggcatggataatattacttgaatttgcttttgccaaatagcaactgataattccagctccacacccgaagtcggcaattctacctgatttcacctgatttagataagggagtaaaacggcagttccgacatctagatgagtttggctgaaaacgccgggtagggcacaaatggtaagttcttgctcatttacttgaacagtataggtttttaaccagctttcaagaggtttgatcttttcagttttctcaatttttaaatgccataactgacaatgtcgggcactatcaagtttaagtattttgccaaagctttgtagttgttttgccgctctctcaacaccaccttttttttcacctactaaaaaaactgattggtcaattttcagatggctcatcactacatgcaatatatagtttaaaagctcttttgattttggaacaaaaattatagcctgatcaaattcttgtaatggaaactcaaccgagaaatgagctgttgcgcctgcatttaaaaaaccctgatagtcagcataattccacgtccagactgatgcatcaatctcagtgggtaattgactgactagggcgtcattcggtgcattaattaacaagaccctaccttttaaatagtcatgttgtcttaatatcacttcacttctagggtccatgtacatctctcatgaagaagaatgcccagtgaaaactgggcagtaatcaaaattaaaattggttatttatgtgtttctgggagtacaacatttaaaattaatgctgcaataccacctgttgctacgccggaactaaaaatatttttaaataattctggcagatgctccaaaatttgtggcacctgagcaacacccaaacctaatgcaagtgaaatcgcaataattaaaagggcacggcgatctaaatgaattgatgaaagtatattaatacctgaggcagcaacggcgccgaacattaccatgactgctccacctaatacggcttgtggaacagcttgtattacaccagctacagcagggaatagacctaataaaatgagtaaagcagcaatccagattcctacataacgacttgctacgccagttaattggataacaccattattttgggcaaacacggagcttgggaaagtattgaataggccagcaagtagtgaatttgcaccatttactaacacaccacccttaatacgttgcatccactgaggaccatctacaggttggtttgatagtttactggttgccgttacgtcaccaattgcttctaaagacgtaaccaaataaataaatgccattggaataaataagccccatgagaagcttaagccaaaatgcatcggtgtcggaatttgaatcacgggcgcatcttttagaccagagaagtctagatatcccataaagccggcaagaatgtagccaatcactaaagcaattaaaatagctgaacttttaatccagacaatacgaatacggtttaggacaataataatagcaagaaccgtacacgacattataaggttatcagcactggcaaaagtatggtcctgcatggcttgataaccaccgcccatactaatcaaaccttctttaatgagcgttagaccaatcaggagtaccacaatacctgtcacaaggggagtaattagcttttttacccatgggagaatttgtgatacgcccatttcaataaatgaacctgcaatcacaacaccaaaaatagcagccataacttgattgactggtgtacctgcagcaaccattgcactgccaataccgataatcgggccaataaagttaaaacttgtaccttgaacaataagtaagcctgcaccaaacggaccaacttttttacattgtaagaaagtcgcgattcctgaaatgaccaaagacattgataaaatcatattggtttcatttcgtggaacgcctaatgctaagcaaattagaagcccgggagtaacaatcgggacaataattgcaagcaaatgttgaaaggctgccaaaaaagccacgaacggttttggtcggtcatctagcccataaacgaggtcaagacggtcttgtgatggttgattggacatgggagtaaatacgccgcaatttcgcaaattggcgctattctaatcgagatacctatctttacaaaacgaaatacagactattggaaaatttttttgtcaatgtcaataaactgtcactactcaagagtagtgtttttctgtataatttgccctcaaattttaggcgtttcgaattttcatgtcagatatcaaaaatctccgtaatatcgcaattattgcgcacgtcgaccacgggaaaaccacacttgtcgataaactacttcagcaatcaggtgctctcggtgaccgagcaggcgagattgagcgtgtcatggactcgaatgcgcttgaaagtgaacgtggtattaccatcttagcgaaaaacaccgctattacttggttagacaaacgtaccgatacaacttaccgtatcaacatcgtggataccccgggacacgccgacttcggtggtgaagtagaacgtgtaatgtcgatggttgactgcgtactacttcttgttgactcacaagaaggcccaatgccacaaactcgctttgtgactcaaaaagcctttgctcgtggtttaaaaccaatcgtgattatcaacaaagttgacaagccaagtgctcgtccagactgggtaatcgatcaagtatttgatttgtttgataaccttggcgcaactgatgagcaacttgatttcccaatcgtttatgcatcaggtttacgtggtgtagcgggtcctgctcctgaagagcttgcagaagacatgactccgttgttcgaaacgattgtagacatcgttgagccaccagctgttgatgttgatggtccattccaaatgcagatttcatcacttgactataacagcttcgtaggtgttatcggtgttggtcgtattcaacgtggttctgtaaaactaaatactcctgttactgtaattgacaaagaaggcaatacacgtaacggtcgtatcttaaaaatcatgggttaccatggtttagagcgtattgatgttgattctgcatctgcgggcgatatcgtatgtattactggtattgatgctcttaacatttctgacacgatttgtgatccgaaaaacgttgaagcattaccacctttatctgtagatgaacctacagtgtctatgactttccaagtaaacaactctccgtttgctggtaaagaaggtaaattcgtaacttcacgtaacattcgtgagcgtcttgaccgcgaattaattcacaacgtagctttacgtgttgaagatactgacagtccagaccgtttcaaagtatctggccgtggtgaacttcacctttcagttttaattgaaaacatgcgtcgtgaaggcttcgaattaggtgtatcacgtccgcaagtaatcattaaagaaattgatggtgaaaaacaagaaccttacgaaaacgtaacgtttgacgttgaagagcagcaccaaggcgctgtaatggaacaaatgggtcaccgtaaaggcgaaatgaccaatatggaagttgacggtaagggccgtatccgtattgaagcaactgttccttcacgtggtttaattggtttccgttctgaattcttaaccatgacctctggtactggtattatgacttcaagcttctctcactatggtcctcttaaacaaggtactgttgcgaagcgtcaaaacggtgtgttgatttctatggttcaaggtacatgcttgggctatgcattattcagcttacaagaccgcggtcgtttattcgctaagccacagttagaagtttacgaaggtatgatcgtaggtattaactctcgttcagacgatatggttgtaaacccaactaaagcgaaacagttaactaacgttcgtgcgtctggtactgatgatgctttaactttaacacctgcaattgaattcacgcttgaacaagctcttgaatttattgaagatgacgagttagtagaagttactccaaaatcaattcgtatccgtaagcgttacttgactgaaaatgaacgtaaacgtaaccgtgataaataatttttcttaaatgaaaaagaaaaaccgctaaattcgtttagcggttttttattgcttactggtaaagctgaaagtaaacttaaagtcatatttttcttgtaagcaaatatgttgttaaagtgtgaaatagctttctttttttgaaaaaaatattaaattatcaatatcatggcgagtactatctagacggataagaggccagtgaaaaaagaaaaatatgatgtgttcctcccccctacatctggagatgtttagatgagtattattcaagaatttaaagaatttgccattaaaggcaatatgatggatttagccattggtgtaattattggtggtgcttttggcaaaatcgtagactcgttagtaaaagatatcatcatgccacttatcactgtaattactggtggtggtgttgatttctcgcagaaatttatcgtgttaggtgcaaaccctaataacttacaatctctagatgccttacaaaaagcaggtatcaatgtattaacttatggtaacttcctgaccattttaattaacttcctgattttggcttgggttgtgttcttaatggtgaaattattaaacaaacttcgccgtgataagaatgagccagaagctccagctgcaactccagaagacatccaattattacgtgaaattcgtgatgagttgaaaaaacaagcttaataaaaagtatttaagtataaaaaacggtacctagtgtaccgttttttattacatagcattttatactggactagagatattgataaacttgctaaatcacagttaagtttagctaagcagatagaacaaggacataaattaatgaatcagctttttgtatatggaactttatgccctaataaagcaaatgctcatattttagagcagattggtggtaactggacaaaagcgagtgtacgaggagtgattcatattttagattggggaccagacaaaggcttaaaggccttagaattagatccagaagcagattgggtagaaggctatttgtttagcacagaaaagttagcagaaaactggcaaatgttagatgattttgaaggctttcaataccaacgcgtgacagcagatataaaattagaatcgggtgagtatgttaaagcctggacatatcaaatcaatatgcaggctaaagctccccacaattacaagtaaaatgctgaaatcaacgtaagccagtcattctgaatttaacttctaagagatgatagccaaactggcttttgattggaccttgtaatacacgttcagcagccgtaaaaactactttgtcaatgacaggcaccaattgcccttttttgacttcaccaagttcaccaccacgttttgccgaattacaggtggagtattgcttggcaagtttggcaaagtcagcaccactttgtagcttctttttcagctgttcggctaagtctttatctttgactaaaatatgtcggacaattgctgtttgcatgttgtcttcctccaaaaaattaaggctttctcagctttttaagtggttggcactgtgggcaaaatacgctggcacgctgaccgagttttaagttttctaatgtggtttcacagttaacacacatttcaccggcacgaccataagcgagtaaagtctgttgaaaataaccattttcacccatggcattgctgtagtctcgtaaagtcgagccacctaaatcaattgctgacttcaaaattcgcttaatctcaacaaccagtttctcaatctgttgcatggttaaatcaccagcgggctgtgctggatgaatgccaacattaaacaaactttcagttgcatagatattgccaacaccaaccactacatgattatccatgagtgcaatttttatgccgacagatttattcttgagtttaaaagctaaatattctgcatgaaagtcagtacttaaaggctctggccctaaagtatcgatgagtttgccttgagtttcaggattaagccaaagaatacagccaaaacgacgtgggtcatggtaacgtaactgctgatcttcaaattgaataatgagatgatcgtgttttctcaattcatcgtttggttgacacaggcgaaaactacctgacattcctaaatgccagagcatttgatcttgttcaaactctgccaaaatatattttgaacgtcgatttaacccaatgagacgttgcccaacaagtttctgaacattatctggtataggccagcgtaagctaggattgcgtacttcaacacttagaactttttgattcaataagggaaataaactggttttagtggtttcgacttcgggtaactcaggcatgccaactcgcagaattaacagatatactggattaatcaagtataacgtgtggtatgtaatatttcagagaatactatgtcagatattttaccattaagctggtttcaacgagaaacttcggaagtagcatatgatttaatcggctgcgtattatgtaagcgacagccggatggacaagttatccgctgtacaattagtgaaacagaagcttatttgggcgttcgcgataaagcctgccatagctacaatgacaaacgtaccgcacggacagaggtgatgtatcgccatggtggtaccatttatgtctatttaatttatggcatgtatgaaatgctcaacattattactcaaacagaaggtgtacctgaaggagtgatgattcgatcagcatttttaaatagtgcttcaactaaaaaagaatataagcttttggctggacccggcaaactgacacgttatttgggcattgatcggaccttaaagggccagactttaggtgaagaatctggactatggattgaagcagccactacacagccagaagtggttttaacgccacgtattggaattgattatgccgaggaagcaaaagactggcctgaacggtattgctggaaagatcatccatcattaagtcgataattctcatttggcaaacaaacttatatggcaaaacgagcgttccagatttacaacaatgtagaccgaattctatatccagacaagacactgctttttgttatcataactacaatataaataaaggaaataagcatgtccttattacgcttagaccgacttcattactgtattttgatgagtatgggctgtatttctagcccacttgtttgggcagaagacttaaattcagacgttgcccaattgccaactttacatgtggaagcgacacgtactgacaccggttatttacaaacaccagcttcggttttccgaatcgaggcacctcaagtggatagttcttcacaagtaaatttaactgaagttgtgaagggcataccgagtttacagattcgtaaccgtgaaaattatgcgcaagatctacagctatctatgcgtggttttggtgcacgttctacgtttggtgtacgtggtattcgtctttatgtggatggtatccctgcaacaatgccagatgggcagggccaaacatctaatatcgacttaagcagtttagatcatgttgaagttctaacagggcctttttcttcactttatggaaattcatcaggcgggactattttaacttctactaaagaagggcaagggaaagactcaattgagctgagttattcgggtggtagccatgataaaagccgagcaggacttgtgctgcaaggtggagcaaagggtgcgaatgaaccaagctatattattagctcatcatactttgataccgacggttaccgcgaacatagcggtgcagaaaaagtactaaataatgcctctgtacacgataaaaatagataactcattgaaataatgtcataataattgttttctaacgacgaatactatgacacatctcaatgagttatatcttatcttaaacaaatatctaaaatggaacaagtcacatttaaagtgctttgcgctcatcatgcttgtgattattttaaagcaaacatgtaatctttcttctgcatctaaagccttgcccatcaagtgcttaccacaatcattttatcgacgtatgcagcgcttctttgcaggtcagtattttgattatcgtcaaatttctcagttgattttcaatatgttttcattcgaccaagtgcaactgactttagatagaaccaattggaaatggggaaaacgaaatattaatatcctgatgctcgcaatcgtttatcgtggaatagcgatacctatcctttggacattgcttaataaacgtggaaattcagatacgaaagagcgtattgctttgattcaacgctttatagccatttttggtaaagaccgtattgtgaatgtgttcgcagacagagagtttatcggtgagcagtggtttacatggttaattgaacaagacatcaacttctgcattcgtgttaaaaaaacttcattgtcaccaatcatttaggaaagaatcataaaattagtgatttatttcgccatcttaaagttggtcaaattgaatgtcgtaaacgacggattttggttggtcgggtgaaactatatataagtgcactacagttagaaaatggagagcttttactcgtcgtttctcctcagtttaatgccaatgctattcaggattatgcattacgctgggaaattgaaaccttattcagttgtctcaaaggacgcgggtttaatcttgaaaatacgcgcttgacagaccctagacgagtgaaaaaattgattgcggtgttagctataagcttctgttggtgttacttaacgggtgaatggcaacatgatcaaaaaaaagcgataaaaataaagaagcatggacgactctcaatgagtttatttcgctatggtttagactatgttcaaatggcgattcagcgtttaattggttttgggaaaaaagaagagtttaaggaaattttggcaattttaagaaggcagaaccctgataggataagggttctgtgaaatttgtcgtgtacagagaaataatgcaaagctcagctggaatcttgatgatggtagtaaaatcaactgggtaaccaactatgtaaaaatccacgccgatgatccgcagggtctaacgcatgatcagtggaatgcaaatccaaagcaacaagttccatttttaaagcaatttaatgttcgtaaagatattgaacaaacccaaacgggcgtgacatggtctaagccgattaatgacaaaaatgaactctatgccatggcatatttaggcaatcgtcaagtcacacaatatcaatctattcctaagtccacccaagatgcgagcataaaccatgccggtggagtcattgattttgaacgtaattattatggcgctgatttccgttggacgggtaaagagttacttccaaataccacgctaagtgtcggtgtggcacttgatgcaatggatgaagatcgtaaaggttttgaaaactttaatttagtaaatggtcaaccttcttatggtgtcaaaggtaatttacgtcgtgatgaagacaatactttatggaatatcgatccatatttacaagcttcatggcagttcttacctacatggcgtttagacacgggtgttcgctatagcaatgtccactacaaatctgaagataactatttaagtaatggtgatgatagtggtaagacggattacgataaagttttaccgtcggtcgctttaagttggcaaattttacctgaacttatggcctatgtaagttatgccaaaggttttgaaacaccaacttttactgaaatggcatatcgacctgatggtcaaagtggttttaattttgatttaacagcttcaacaagcgatacctatgaaacaggtttaaagtcacaaaaccaattaggtgattttactttggcggttttccagactaaaactaaagatgacattgtttcggccggtaactcaaatggccgatcaacgttccgtaatgcagataaaaccttacgtgaaggtgtagaatttgcatggaataaaaagttatggcgagacttaatagcgaccgcaagctactcgtatttagatgcaacctttgatgctgacattccagcgttaggaaatattgctcagatttcctcaggaaatgccataccgggtattgccaaaaaccaagcttatgcctctttggcatggcagccatcgcacggtctatatggtggtgtagatgtacagtatatggacaaagtatacgtgaatgataccaacagtgacgcagcaccgagctacagtgtaacctcagcaaatgttggttatgcatgggtaatgggcgattggaaagtcaatagctttgctcgtgtagataacctctttgataaaaaatatgtaggttcagtgattgtaaatgacggtaatagccgctatttcgaacctgctgatggacgtaactggagtgcaggtttacgtgtaattaaacaattctaggaattaaaaatggcaaaattatttgaaacggttaatttcgattcactacaactggtcaatagaattgtaattgccccaatgtgccaatattcggcaacagatgaaggcgaaattacctattggcatgaacagcaatgggcaaattacgcgttgtctggagctgggctatgtattgtggaagctacagctgtacaggcggaaggtcgaattagttatgcagatcttggcctttggaatgatcagcaacgtgaccagatcaaaactttattgggaaaagttaaaacactttctcctatgccatttggaattcagttagctcatgctggacgtaaggcatctactgaaaagccttggttgggtaaaggccaaattgcaaaagatcagccacatggttggcaaacagttgctccaagtacaagtactttttcggttcatgatgcagcgccacatgctttaaccattgccgagattaaacaaattcaacaagactttgcagctgcggccaaacgtgcagttgaagcgggctttgagttaattgaggtacatgctgctcatggttacttgctacaccaattcttatcgccaattgcaaatcaacgtactgatgaatatggtggctctttagaaaaccgtatgcgtatgacgctagaggttcttcaggcaattaaacttgctgttcccgaaggttatccggtaggggtacgtttatctgcaacagattggatggatggcaatgagcagtgggatattgagtctacggttggtttatcaaaagccttagagcagttaggcgcggcctatattcatgtctctagtggcggtttacatgagcatcaaaatattactattggagcaggttaccaagttcctttcgcggaacaggttaaaaaacatgtagctattcctgtgattgctgtaggtcttattactgacccacaacaagctgaacaaattttagaaaaccagcaagctgatgccattggtcttgcgcgtgcaatgttatatgacccacgttggccatggcatgctgctgctacattgggtgcaaaagtcaaaattgctccccaatatttgcgttgccaaccacatggcttaaaacagctttttgattctttttagtttttaatattcgggcaaattaagatttgcccgttttcttttgaaatgagtgaggaagtagtctgtggtttttcaggtaattttaccaattttgattttattattgatggggtactgtagtgtcctcattaaactggtaacacctgaacaaattaaggctctgagtgcatttgttattaaaatttctttacctgcttttttaatccaatctttagccaataaaaacttacaagatatttggcacccagcttattttattgcttatggtggcggctctttaatcttgttttttttggcttttatcctttaccgcaagtattttaaaaatagcctaacacatagtgcagtcatatcgatgggcgcttctatgtcaaatacaggttttatgggtacagcgattctaaccatgctaatggggagtcatgctgcaatctatatatctttaaccttaattatcgaaaatttattaatagttgctttaatgctcattttggcagaagcgggtttgcatcaacagcaacggcttttgcctttactgaaaaaaacattcatgaatttacttaaaaaccctgtaattattgcaattttagttgggatgagctgcattttgctagatattcatctgccttcaaaacttggacaagccttagaacttttaggaagaacagcttcgcctctagcattatttgctattggtggcagcttggttggtattggtattaccgccgtgaatttccaaagtatattgttggctggatttaatgtcatccttatgcctgttgtgatttttgggctgttccttttactgccaaacgtgagccaagagatgttatatgctggcactttacttgctgcgctgccaatgccgatcgcttttggtatttttgggcaagcctacggtttaaatgaaagagcattaacccccttaatgattagtaccattattggctttatgggtgtgagtgggcttattgccttgtggtggtaaaagaaaagccccatgaggggctattgtctctttactattttttaggagctggctgcataggagcggcggcagcttgtttattcttctcagcaataattttttcgaccgaagctaaagattctctagcattaggaacattttgcttagcaagctcagtaaagatctgttttgcttgaggcaggttctgaggaatgatattgccattcgccatcatggttgctaaagccatagatgcaggcgcataacccttttgagcaattgtttgcaaagcttcaatgccttggcgtttcattaaaggatttttattttcaaccccttggctaatatcataaagcgctttgacctgaatagcagggtagtttccttttctaatcaaaggcgctagcttttgtaaagcaatttggtgagattgaggttttttctgcgcaaataaaatagtcgctattttgacagttgcatcatcagaaccttgagctgatgccttttgaatatattgactgaatttgttgctatctttggcaacacctaattcaccagtctcataaagttgtgcaagcgtgtaactcgcttgagcataacctttatttgaggcatcttcataatatttcagagctttggcattatctttggcagtaccttggcccatttgtgtcatatagcctaagttatagatggcttgagcatttcctgtttgtgcaagacgttggacttcttgaaaggcagcaggataattttttgctgcgtatagctgctcagcctgtttaaatacatcgtttttagctgcagaagccgtcgtgtctgctgcaaagattgatgaacttgaaatggcaattagactggcgataagtaatttcttcatttctttttaaccttttactttgtagctacatcattccatcgatgtattagctcaattcaatttctcatcataaatattgatggccgaaagtaaacagccgatttgtatataaaacgatgtctataaagcaaactgtggagaaaaataatacgccactctacttaagagaatggcgtattggattattttactgactgtaataatgcttcaatctgttttgcatcacttggtacgccagagattctttgaccatcttgtaagaacagagtgggtgtaccatctatatttaatttctggcctaaagcaatatttttctgaattggacttgtacagcttttgccagccgctggcaatttacggttaagcatataatttgtccatgcttctgaagggtttttagagcaccagatttgattagaaaccttttcagcatttggatgtaagctggtcagcggatataagaatacatatacggttacgttatccaccccaaccatattttgttctagacgctgacagtaagggcaatcagggtcactgaaaatataaagagtacgctctcctttacctttgacgtatttaattgcctgatttaatgggagacttttaacatcaattttacccaattcggcaattcgctcttctgtcatatttttttgttgtttgatatcaactaaattgcctacaaaaaagtattttgcatcttgattggtataaacaatacggccacttgtatagacttcataaattccagcgacaggtgactgatagacaccttttacagggaggtctggataatttgtcttcagattttgttcaagtgttttaacatcagcatgagcagaaccgaaaaaagccaaactcaacatgagtgtagcaagtttagttttcatattttttctcttagattacaacgtggattatgatggcatagaaaacttaaaaaattgatgtcctaatttaatgaattcattagaattttgtatctatagaaaagcccgcagatttatccacgggcttttaatttattaaatataattattgtggtctagcaacatcaccacttaaagcttctggtaaatctaaaacttgaagacctaactcttgaagggcggcaggtttcgcaacaactaaggcaatataaccgtcagtagtttgggtactattaaccacttctacgtcattgtgcaattgagttgctggagcaggtgaatcacccgtaccttgaactaaatgcaaccagtgttttggttttgccttaaaccaaaggcgcgccacaatttcttgacctaagtaacagcctttatcgtaattgacgccttcgcgttgatgtaaacgtaattcttgtggctgaaactcatgttcagtcgcttgagcaatccatgcttgacctgtcatgatggcttgtttttgccattcggaaatatcagtttctgtagagctgaactcagtatggccattcacaacttttgggaatacagcaccttgttcacttaaggtcatttttgaaaaagcaccatattttttaatgtgcttcgcgaattcttcagcttgatcttgagtgacaataatttcaaaactttctgcattattcttttttagccacaagccaaaatggatgcggcctttaagatcacaaatggctgtatagcgtgtttcattttcagctaaacgttcagtatctacagtcacttgaccttgtaaaaacttttgtgcatctacaccgtttaatgcatatgaggagaaagcgagcagactcatgattaatctcaaattcaatatgtttctttatgattgctgactattttgctccatttttactaaaaaatcagccatagttttcgtaatttacttttgtataaaacaataggtttaggtcaaaaaaacaccaaaaatatacgttaaaagaaattctacggtttaagctattcaacataatttttataacttaaatggacttaaaataaggagaagacaatggcaacaggtacagtaaaattacatcgagtgtttaaggcaccagctgaacgagtttatcgtgcttttcttgacccagatgctttagttaaatggatggcacctcacggttttaccgcgaaggttcatagttttgatgcaaaagtagggggctcatacaaaatgagctttaccaatttctcaaccgggtcaacgcattcatttggaggtacttatgttgaactcgttcccaatgaattaattcgttataacgaccaatttgacgacacaaatttacctggcacgatgcaggtcaccattacattaaaaacagtattggtcggcacagaaatacacattacccaagaaggaatacctgaagttattcctgtggaagcatgctatttaggctggcaagagtctttatctttattgaagttgttagtagaagccgacattccagatcaataattgtcttttttaattgagacttaagtaaaaagtgagtagaaaaactactcattttttattttttaaacactatcaaaaatgaacaaaatattgaatgatcatatgaagctcaatgagttaagccttcttgtgagataaagatatggatatacaaattaaaagaatttatgacgatgtaagcggtgatgatggaaagcgaattttggttgatcgactatggagtcgagggattagcaaagaaaatgctcatttagatttatggttaaaagaaatagctccttcaaccgaacttcgtaagtggtttcatgcagagtctgcagaacattgggatgagttcaaacaacgttatttaaaagaactagaaacaaaccccgcagttaaagagttattagaaatcgtttcacatcataaagtcacacttttatattcggctaaagatgtggaacataaccatgcgattattttaaaagaatatttattagaaaagagcaaaagttaaatatataaattttttttggtaaaagtcttttatttaaaactttaaaaaatgagtcatatctcgcataatatactttttgagatttttttatgtctttgccaaactgtccaaaatgccaatcagaatatacatatcaagacggcgatttattaatttgtccagaatgctcacacgagtggaaagaaggggaagctttagtaactgaagagcaagaagtgattaaagatgctaatggaaatgttttggcggatggcgatagcgttactgtaattaaagatttaaaaattaaaggttcttcttcagttgttaaagtcggaacaaaagtaaaaagtattcgtttagttccagatgcaagtgatggtcacaatattgactgtaaaattgatggtattggtcagatgaagttaaaatctgaatttgtaaaaaaagcttaatttgttaattttaattacattttggtagagatcgcaggcgtgatctctacctttttacatttcaacatccttataattttattacgataatgtataaaaagtagactatccaaagcttaatagctcatttatattgtcattaagaagaattaactttcgtccagaataataacgaaagtcatacccacaccaacaaaaaaacgaggttcatatggcaggatggtacgaaattacacaagcgaatgatggacaatatcgctttgtacttaaggctggtaatggcgaaattattttaaatagtgagctatataaagcgaaagcatcagcagtcaatggtattgagtcagttcaaaaaaatagtagtgacgatgcgcgatatgatcgtttaactgcaaaaaatgggaaaccttacttcaatttaaaagctgcaaatcatcaaattattggttcgagccagttttatgccagtgaagcttcacgcgataaaggtatcgaatcggttaaaaacaatggatcttccacaaccattaaagacttaacagttcaggtgtaaaattaaattaaaaaaagcagcttctaaaagctgctttttttatttatgtatttattaacgcgctaatttagctaagagttcttctttagttaaattgctcgcttcagcatcacggcgacctttatattcaaaagtacccgcatcaagacctttttcaccaatcacaatacggtgtggaatacccattaattcaaggtcagagaatttaacgcctggacgttcgttacggtcatcaagtaatacgtcaaagccttgggcttgaagttctgcataaagcgcttctgctgcttcaagagtacgtggtgatttgtgtgcattcattggaacaattgcgatttcaaaaggagcaatcgcttgaggccaaataatccctttgtcatcgtagttttgttcaattgcagctgcaactacgcgtgtcacaccaataccataacagcccattgttactgtaaatggtttgccatcttcaccgagaactttacatcctaaagcttcagagtatttagtaccaagttggaaaatatggcccacttcaataccgcgtttaatttgtagtgtacctttaccatctggagatgggtcaccttcaaccacattacgcaaatcgaaaacttcagtaatctgtgcatcacgttcccagtttacgcctacagcatgtttgtctgcctcatttgcaccagcaacgaagtcagaaagaacagatgcagcacggtcaacaattacagtgatgcctttttcaactaaaccttgtggaccagtgaagccagcagttaagccaaatgcttgaagttgttcttctgtggcaaacgcgagaggagcggccactaaaggatgcttctcggctttaatttcattaagttcgtggtcaccacgtaagaatagggcaacgacaggtacattgcctttctcatcagcaacgccttgaaccaataaggcttttacagattgtttagggtcagcatttaagaactggcaaacatcagcaattgttttttgatttggtgtttcaaccaatttaaattcttgtgtaggcgctgcacgctcacccactaaaacagcttcagccatttcaacgtttgctgcataatcagactcagttgaaaatgcaatgtcatcttcaccgcttgcagctaatacgtggaattcatgtgaagctgaaccaccaattgaacctgtatctgcttgtactgggcggaaatctaaacctaaacgagtgaaaatacggctataggtgtcatacatcacatcataagtttcttgtaatgattcttgagttgcatggaaagaataagcatctttcatgatgaactcgcgtgaacgcattacaccaaaacgagggcggatctcatcacggaatttggtttgaatttgatagaaatttacaggaagctgtttataactttttagctcgttacgtgctaaatcggtaatcacttcttcatgtgtaggaccaagcacaaacggattgtcgtgacgatctttgaaacgtaataattcaggaccatattgttcataacgacccgattcttcccacaagcttgcgggttgagttacgggcatgaacacttccatagcacctgaacggttcatttcttcacgaacaatggcatcaacttttttaagcacacgtgttcccatcggcagccatgtatataaaccagatgccaatttacgaatcatccccgcacgtaacatgagctgatgtgaaatcacttcagcatcgtttggggtttctctcaacgttgcaaataaaaagcggcttgcgcgcatggaaaaagtcctaaaagttaagcgttataaaaacgcggattatacgatagtcgctgcattatgacatgaatcgtcgggtttgacgcagcataaagtttttcaagtcatccagataagtgaaaatgacggggacaaccacaagagtcaataaggtagaggtaatgacacccccaattacagcatgagccattggtgcactttgttcaccaccttcacctaaacctagagctaatggaaccatacccatcaccatcgcacttgttgtcatcaagattgggcgtaaacgggttttgcctgcttgtaaaatagcatcataacgacttatcccatcttccatcgcttttttaataaagtcgataagcaaaatcgcgtttttggttaccagccccatcagcataataatgccaataattgaaaatagatttagggtactcctaaataagaataaggccaggaagacaccaatcagggacaatggtaaagatgccataatcgcagcagggtgaataaaactattaaactgagaacccaacacaatataaataaatacaatcgaaagggtaattgccgttaacgcataacccgcagattcagccatatcggcatttgccccttgagtatcaaaggtataaccagctggcaatttgaatgctttttgcattttatcgatatcttgaccgatatccccacttggacgtcctgaagtgtttgcttcaattaaaacttcacgttcaaggtcacgtcggttaatttgcgaagctccaagtttttcttgggttgtggctacggcgcttaatggaactaaaatattttgcccatttgcattggttttattcgagttgagatataggttctgaacatcttggggaagcacacgtttattttcatttaaacggatattcacatcataagtttcgccgtcacgatcttcccatgttgtgacattgtcacctgcaatgagtggtcgaatcgcattcgcaatttgagaaacagataaacctaaatcactggccagtacacggttaatatgtacacctaaagtcggtttaggttcttttaaagagctttctaaatcgaccacaccatcaattttttccatttcagccatgaaacgatccgagattttttgtagttcatttagatcagatcctttaatagaaatcatgattggcttttgaccaccagacactgagtcttgagcagcagcgactgaagtcactcggatgccagctacactttgtaaacgatcacggaattcattgttgagtgttgtcaggtctgcactacgttcttgttttggttttagggtgactcctaaacctgcatggtttttaccggagtcgacttcactgttaaccactccataagtagaaacgacatcagggaattgcctaataatctgatcaacctgatgtaattttgcttgggtatattctaaagaagaatcaactggggtttcgaactgaatacgaatttcacctttatctggtgtaggtacaaattcggttccgatcatttttgataagcctaatgccacaaccaatgaaacaattgcaataatgactgtgatgaaacgaaagcgtaaggcaagctttaaaagcttttcatagatatgcgttaggccatctaatagattagaaatatagttaaagaaacgttgcagtcgactttcttttttctttacaggatctttccagtgtgcggaaagcattgggtcgagtgtaaagctgatgaacatggaaataagaacagccgtacttacagttaccccaaattggtagaagaaacgcccaattaagcctcccataaaggcaactggtaaaaataccgccacaatggtgagtgtggttgcaagtactgctaacccaatttctttagtaccgtctaaagccgcggtgacatggtctttgccgagctctgtatgtctgacaatgttttcccgaaccacaattgcatcatcaattaatagaccaatactcagtgacagggccaacagtgtcatcatgttaatgctaaacccaaatgcccagatgaatgttaatgtgccaagtagggtaatcggtaaggttaaacctgtaataactgtagagcggaaagaacctaaaaatagtaaaacaattaaaactgctaagactgctccttcaataatggtacgaacaacgtctttaattgaagcacgaatacctttagagctgtcagcgacgactttataattcaaagccgcaggcatttgagcttttagcttctctaaggtttgataagtcttatcaacaacctgaattacattagcatcggaactttttaaaatatcgacagaaaccgctgttcttccattataaaaagcacttgattgcagttcggcttgagtatcttcaacggttgctacttgttttagaaaaataggggaaccatttttattagcaataactaaatcaccaaatccaagaggatggatgacttttgattgaatctgaacaaccagttcagaattcttttgttgtaaggttcctgcaggtacttctatattttcattttttagggtgttaatgacctgatcaataccaataccatagctttgtaattgttcaggatgaaccttaatccgaatttgacgtttagcatcacctagtaaattgacattacccacaccagaaacagttttaagctgaggtacaatttttttgtctacataggagcttaattgagccaagctcatgctgttcgattcaaacacgactgacataattgggctagatgatggatcgtagcgttgtacaatcggtgtatcaatttcatcgcgaaattgggcaataactggagcaattttgtcgcgaacatcctgtgctgcaatcgccgaagacgtatcaagattaaactctgcaatcaccatcgaaagcccttcacttgagcgtgaagtgatttgtttaatacccgaaatggtattgatttgatcttcgagttttttggtaatatccgattcaactgcttcaggtgaagcacccgcatattgcgtagtgacgactacgaatgggaaatcaatatttggaaactcttcaacggtcatacgtttccaagatgctaacccgagtaccattagactgagcatcatcatgatggtaaaaacggggtacttcacactaattcgggtaaaccacataagctatttgctaccttatttatttttttcggttgtaagcgtcacttttttattgatatcagaatcttcaaactgaatacgacttacctgatctgtactttgtaaaccctgaactaaagcgatattttcgttgtatcgttgctcaaccactcgaattttgactttctgaatcgtttgattgcgtattacccatacaaaaggatcatgttgcagattttgaatgctatctaaaggaatggtttgcccctgattgctatcattatgcaaaataataccgttaataaacgcaccaatacttaatgaatcaatcgcttctttagggctcgcaaagaattcaatttgtcggctgtcttggtctgctacaggtgaaatacgggtcagtatggcatgtaattgtttcgagttaccctgaatctgatactggatagagctacctacttttaaggcagattgttgctcaataggtagtttcgcttgtatttctaattgatccggattaacgatttcaaataatgtttgtccaaccgaaacggtttgtcccggttcaacttgtcgtttcgtaatcacacctgaaatggggctagtaataataccgtctcgatcagcttttttagcaatatccacattggcttgttgagctctaacactttcaagttgacctttataatccacctgactttgctcaaactctacacgggcaataaagccttgattgagcaatctttgttttcgattcatcaaattacgtgcaagttctgcttgtgcctgagcagaagcaagattagcctgtgcctgagctaagcgtgcagcgttgtcttgattatttaatctaactaggacttggcctttttgtaccttttgacctacattggctgtaacggcagttgctgttgcactaacttgggcttgaatagaactttgttgtactgcacgaatagttcctgtaaaagcggtttgagcggcgagtgagccttcttttacaggaattaaatcttgaggaatgagttcaatttttttaggttcagatgctgttgtttttggtacttcttgctggttacatgcagctaagattaaactcagactgatcaagcttaatttaaaaaaagtagaaggggtaagatgcgttgtgcgcatacagcatcatcctgtaattcaaattttattttgcccctattcttgataaagctgtaaccttattcaagcttttttaaacgttcgataatattttcataatctttattggtgcgattataggttttcgaaagtatttcaagtgtttgtttaaccttattaatattcataagattgttttcaatcaaggttttatgtctttcgggaacttgttcacccttacgaaaatattccatttcttgccgtttaaataaaattttgtcttgttgtaattggctcagttggtcctgctgataatttatttgttttttaattgccaataatgcttggtctcttttaatcgtcgcagttttactattgctatatgctctttttaatttgttatcttcttctctatatcgagctgataatgcacgctgtgaggactgatttaaatcggcttcagaattataaggatgatttcttttaatgacctgcatattctggtcgagtgcttcatatccatagcgaatatgagccggtgttacggatgtactaatattcgcaataccatgctgatcataataacgataccagacagctttaggagctgcatttgcagccaacgttggggaagagaaaaacagtgctccgcaagaggcaatgcctataaatacagacaagcagttcctataaaaggcatatttcatccgcttattcataaaattccccaaaaaagaaaggtaagtcacttatttttaaataattaatcttaaatatattagttattatttaactgaataaaaatatcgacattataaaaaaaatgataatttttttgaaagtgtgatgaggttaaaagttattgtttataaatgagaaagtagacaaaaagctttcattgaaaatagaagtatagatatgttaaaaatgcgtataaatctgtaaaaacaaatttaagttaaattgcatttatattttatgttatggggatggaagattaaatggaagatgcattccaaaatctgaaagtaatggttattgatgactcaaaaactattcgccgtaccgcagaaactctattgcaacgcgaaggttgcgaagtgattactgctgtcgatggatttgaagctttatctaaaattgctgaagcgaatccggatattgtttttgtagatatcatgatgcctcgtttagacggttatcaaacttgtgctctgattaagaactctcaaaattatcagaacattcccgttatcatgctctctagtaaagatggtttatttgatcaggcaaaagggcgtgtggtaggttcagatgaatacttgacgaaaccttttagcaaagatgaattgctaaatgcgattcgtaatcatgtaagttcataataagtaatttgagggcaaaagaaatggcacgtattctcattgttgatgactcaccaacagaaacttttcgttttaaagaaatcctaactaagcatggctatgacgtacttgaagcatctaacggtgcagatggtgtgactttggcaaaagctgagcagcctgacttggtattaatggatgtggtcatgccaggtgtaaatggttttcaggcaacgcgccagattacccgtgatgaagacacgaagcatattccggtggtgattgtgagtactaaagatcaggcaactgaccgagtatggggtaaacgtcaaggcgcaatcgattacttaatcaagccaatcgaagaaaagcaattaattgatgtaattaaacaatttctaaattaactcatccatccataaaaacataaataacgggataaatacgcccgttttataggatcgagtatggcagcgaatggatttatcgagttacttcgtttgtctaaacggggtaataagaattacgcttcagttcaaaatgaagcacagcgatggtcaggaattgcttttgaaatgagagggcaatacttcgtcgcaccacttggggaagtgtcagaagttatctatccaccgaaatatacaccagttccaaatactcaaagttgggtcaagggattggcaaacattcgtggaagattactttcggtatctgatttggctcattttatttcagggcagcggagttcattttcgtctacccaaaaagtgctgtgtattagccatcatgaccagtatgtggggttggttgtggatcaggttttggggattcagcactttaataaaaaaagttttttttccgagagtttagacttagaggaaaacctaaaagaatattgccaagggtattttcaccaacacaatcaacattggcatgtctttttatttagtcggttattgcaaaacccacactacatgaacgcatcgacaaaatttataaactaatttttatgctgtgaatgaacagcgtatttttctggggagaagctgtatgggctttaaacttaaaaagaaaagtggcaatcgcggtgctaccggaaaatcgagtgtcaattttattgcaaaaatccagtcaaaaattgagcagtttgccagtttatttggggaaagtgaaaagtccaagcctatcctttatgcagcgctgttatgtttagtatgtgcgttaatttcattagcttatctattttataatgtacctcgtcataaccagttaattcgaagtcttggtgagttacgtctgttatctcaaaccatttctaagcaagcaactgaagcaacagagtcgggttctcaagaggcgatcacaaagctacagcaatctaaaaaagactttgatgagaacttacttgaaattgaaaatattcacggtaagtcgaccgatgaatatcaaaaagttgagaaaatatggggtgaggtttcaaaaaatattgatttgatttcatcacatcaacgagtacttaaccagttatatgataccaacatctcgattagtgaaacggttccagagattcaggcagaatataacttgatggtcgaccaaatggctcgccaaggtttgccaagtagtcaggtaattattgctaaaaaccaggtatttattgcagagcgtattttacgttcgattaactcggtgttaagtggtacggacggaaatgtatcaactagtgactttagtgtcgatattgagacttttggtacctatttaaatgctgaactgaatggtaatgccgagttaggtgttgatcgtattgctgatccggctttacgtgaatctttagaaagtattaagtctgaatatgacaaagtcttaaaatctgctgctgcaacggtattaaaaaatggtagccagattgtcaatgttcgtcaggcttcttctcagattttctctaaatcggatgtaatgttggaaagtctaggacatttatctgatgttgcaagaaagaactggctcaccttatttttaggtgctgttcttattctttcattaggcggactaattttctctgtattcaagttaattacactacgtagtgtaatggataagcaacgtgttgctcgattacaggaagaatatgaccgtaaccagaatgcgattttacgtttacttgatgaaattgccgacttggcggatggtgacttacgttcatatgcaactgtatctgaagactttacgggtgctattgccgactcgattaacttcgcaattgaccaactgcgagatttggtttcacgaattcatgaaacctctcaggaagttgcacgctacacacaagatacgcaaagtattactaaccagttagcagaggcatcagaacatcaggcgcaagaaattgcaggtgcttctactgccatgaatgaaatggcacagtcaattgaccaagtatctgccaacgcttctgaatctgcggaagtagcacagcgttcagtacaaattgcatcaaatggtgcacaagtggtaaatcgttcaattgaaggtatggatactattcgtgagcagattcaggaaacttctaaacgtattaagcgcttaggtgagtcttctcaagaaattggtaacatcgtatcgctcattaacgatattgcagaccaaacgaacatccttgcattaaatgcagcaattcaagcatctatggcaggtgaggctggtcgtggtttcgccgtggttgccgatgaagtacaacgtcttgctgagcgctcagcatctgcaaccaaacagatcgaaacactggttaaaacaattcagaccgataccaacgaagccgttatttcaatggaacaaacaacgacggaagttgtacgtggtgcgaatttggcaaaagatgcgggtattgcactggatgaaatccaaaaagtatcgggtgacttggcaaaattgattgcgagcatttccgacgcagcaaaacttcagtcagcatctgcgagtcacattgcaaccaccatgacggttgtacaagaaattacttcgcaaacaacaacggcaacgtttgacactgctcgctccgtatcagagttggcgaatatggcagagtcattacgtgagtcagtaacggactttaaattaccagactaaattgggggataagaatagctattctcatatcgctattcttttaaaagtatgagcagcgccagacaaatattggggagatagttatttttctggtgttgtctctgtagttttccccactcagggggtaagcaaaagaagcctttgctatgaaagaaatattaaaaactttaactgaagcaatgacgctacctgaagatagctattctgaacaagatgctgagtttcttgagatcttcattgaagaaattgaagagatttttgttgatttgcaacctttgataaataaatggatgcagtctgagaatattgctacgctcactgaaattcgtcgtcatttccataccttaaaaggttccggaagaatgattggcgctaaatcttcagctgagcttgcgtggacagttgaagatacactcaaccgggtaatcaaccaaagcttacaattaacgccaactattcagagctatgtgcagttagtatttaagttctatttccttaaattagtagataattttaagcaaaaacgagcacataccttagatttcagacctcttattttattaggccaacaactacaacaacagcaaagtttagaaccagctttagaagagcttttacaactttcaaatacgcttacggccgaaacagtgactggtcttgagctagattatattgaacaagattcgttagccgagccaatcattcaagctactcatactgaaattgaaataaatctagatgaaactttgaccttatttatggaagaggcggaagaacatttagccacgattcatcaatttttggatcaagagttacatcagtacgacagttataacgctttaatccgcgctttacatactttgcgtggtagctctgcaatggcacaggtcgaaacaattttcgaggccagtaccaaagttgagcatttatttaaaatactgctacaagaagagttatcttctcactctgaagaaattttattattacaagaatatcgtgagtttgttcgagatagcttggaactactatctagatatagttcaagtgaacagctcgaagcgagattgcagcaatttaatcaatcttgggatgcatatgttgagcaacatggtgaccgaacagatccgttaatgccttctcatggcttggtatcgcaattattacaattagatgtttctgaattactggatgcagaattagattttgagaagggtattcgtaatgagtttcctgattatcttgaacgcctaagtgaacaggctgatttattactgcaacatacacattctcaagcaatgttgggtttacatgaatataccagccaactgaaagaaagttatgaagtgctgcttgataaacctactttattacaatcagactatatatttgaaatttatcaaaaagcgcatcaacagctcattcaattatttgatgctttagctgctggtcagcgagtcggtattgttaagcaacatcaaagtattttagaagaattaaaactttatacgcagtacactccagacctatcaaatgacctgcctcagcaggattcgacatcttttgaaccaatatccaatattgaacaagagccagaagtagtagctactgtagagaatttctcagactctgtagactgggcggtattaggtcaaagtgtgcagcaagatcgacaatatatttcatctacacaagtgaatcgaaattttgatgctgatcttttagatatctttcttgaggaagctgaagaattacttgagggaattgataccgatcttaatatttgggtaggtgagcaagaaaactttgcagctctgaacaacctaatgcgttatttgcataccttgaaagggggagcaaatatggttcaggcaacgtatcttggtttgattgcccatgaattagaaagcatttatgagcgtttaattcaaaagcaattagtagcaacttcagatttaattgattttattcgtttggttcaagatgacttggctgaccgtttacaaatcatgcgtgaacaacaactagattatgcagccccttacacaattaacgcattaaaacgagcgggtcaaaactctaacttccaacctttaccagtggttgaggcatttgatactgaaagtgagatattctctgagcaagaggtgatatctgaagtaataatagatgagataccagtagaacttgaacctgctcttgcagagttagaaactcatcacgatcaggtattcgacacagcggctaccgagttagctactccagttgaagtaattacctcggttacatcgcaagagagtgaaattgcagctgatgaacaggacattgaggctgttgttgaacagacgttcctggaagaagctactgaattgttagaaatggctgaatcgctattaaaacaatggtttgaacagcgtacaaaccgtagtattttgcttcagcttcaaagagccgtgcacagtttaaaaggtggtgcacggatggtgggtttagaagccgtacaagcaattgcctaccaactagaaaatgcttttgaacaatttgcgctacatcacttcaattcgaatatttatgatcatttattagaaagtgcgattgcatggttaaaagatgcaattttcaaccacaattatcagcatttcgatggattacagcaaagtttagaaaatattcaattctttgaaactacaatccagattccgactaagttaactagagcggacttgtttaactcagaaccggtgatgacctttatacaaggtgatggtacagagcctccaccaatgatgggagcatgggagcaaacagagcgtctggatcagaataatgaaatgatccgtgtttcagctgacttaatcgagaaaatgattgatttgtctggtgaaaactccattaaccgttcacgaattgaaatggacctaagccaatttagccatacactagttgaaatggagttggcgattcaacgacttgccgatcagttgcgacgaatggaaggtgagttagaaacacagattattgctaaacatggaattgaacattctcgttatactgactttgacccattagagatggaccaatattcatctttaaatcaattgtcgaaatcgcttgctgaatctgcatcggacttggtcgactttaaaaatacgttatctgacaaaatcagagataccgaaagtttgcttttacaacaatcacgaattcaagcggaaattcaagaaggtttaatgcggacacgtttggtcccattttcgcgtttattgccgcgtttacaacgaattgttcgtcagacgtctacagcattgaatagacctgctgagcttttcgtaaataatacggaaggtgagttggaccgcaatattttagaacggttagtgactccgcttgagcatatgctcagaaacgcaattgaccatggtttagaagaccgaatgcagcggcaacaagcaaataaaccggaaacagggcgtattgaacttaatattcagcgtcaaggtacggatgttgtggttgtctttagtgatgatggtcaaggcattgatgttgaaaaagtacgtcagaaagcactccttgccggattgatcaagccagaacaagacttagaacagcaagacatactgcaactcattttccatccgggtttaagtacagcagagcaagtcactcagatttccgggcgtggtgtaggtcttgatgtcgtgcagagtgatattaagtctttggggggacatgtcagcgttgaatccgtctatgggcagggaacaacatttacgattcgcgtaccgactacagtagcggtaagtgatgccttaatggttaaagtggcagatcaacaatttgcgattccacttgctcaaatcgatcgaattattcgagtgtcaccagcctctttagagcagtattttgaaagtcctcaagaactatttgagtatgaaaataaacgttatccattacgttatctttctgaatttgttggtaaccaacccataccacgtttaaatggtgtgatgtattcattacctgtgttaatgattaaagccaataatggccaaactgtggcactacttgttgaccagttaattggctctcgagcacaaattgtagtgaaaccaattggtcaacagttctctagcattggagcaattgcaggcgccacaattttaggtgatggacaggtctgcttaattttagacggacaaaatattgcgcgacaaattcagtcaactcagcgtcataaacaacttagtgaagcagtgtatagacaccgagagtctgatgaacgccgcctcatcatgattgtagatgactcagtaactgtacgtaaggtcacgtcccgattgcttgaacgtcaaggctatgatgtggttacggctaaagatggtgttgacgccatagagcagctagaaaatattaagccagatttgatgctacttgatattgaaatgccacgtatggatggttttgaggttctcaatcttgtacgacatcatgatatgcatcaatacatgccaattattatgattacatccagaacaggcgaaaaacatcgtgaacgagcattctcgttaggtgtaagtcaatatatgggtaaacctttccaggaagaagagttactagagaatatcgatgctttacttgtagcgtctgacagtgaggtcaaatcatgaaaggtagtgtaaatacatcattgatcgctaatatggaccaacaagagctacagcatcttattacagtttcaactggttttattgacgcttatatcattgaatgtaacgatcaggtacctatgctattgccacaaaacattgtgttgtctgccatggatgtaaaaaatggcgtaaaacatattgaatggcatgatgtgaagctacccgtctactcagtacataacacaattgatcaacatgcagtagcattagtgattgaaggggaagatattagccaacgttttgcattaatctgtaaaacaatgccagtttctactcgtctgcgtatttctgaaattgtcgatgaaatggatgagcatgaggctgaacaacacccagcagtatttaaatatgtgcgtatgcaagatcaacgctactatatacctaacttagaatatattgaaaaattacttggtttataaaagaaaaaggaactcttttgagttccttttttattttattgagctaataaattttctaaaatttgctcataaatatcagttaatggatcaagatcatgtacatcaacatgttcattaatttgatggatagttgcgtttagaacaccgagttctaaaacttgtgcacctgttggagcaatgaagcgcccatcagatgtaccaccacttgttgaaagctcagtctcagtaccagtcacatttaaaatagcagtttgagctgcgttaactaattcacctactggagttaagaatggtaagccagacaaattccagacaatttcatattgcaagccatgcttgtctaaaatttcatgaacacgttgtttaagctgttctgctgtaacctcggttgaatagcggaaattaaaagtaacttctaaagcaccagggattacattggttgcgccagtacctgcatggatatttgaaatctggaatgaagttgcagggaaatactcattgccattgtcccaaactgtttggcacaactcagctaacgctggggatgcttcatgaattggattacgtgccaagtgtgggtaagctacatgaccttgtttgccttgaaccttcaatacagcattaagagaaccacgacggccattcttaacaatatcacctaatttatgagtacttgatggttccccaaccaaacaccaagtaattttttcattacgcttttccagtgtttcgataactttaactgtaccgttaacagcaggaccttcttcatctgaagtaattaaaaaagcaattgaacctttatggtttgggtgttttgctataaaacgttcagatgcaactaccattgcagctaatgcagttttcatatctgctgaaccacgaccatataatttgccatcgcgaatttctggtgcaaatgggtctgaattccaagcgtctaaacgtcctgttggtactacgtcggtatgaccagcaaaacaaaatacagggccttcggttccacgtcgagcccataaattatcgacatctccaaagcgcataggttcaatatggaagccaaccttagctaagcgctcagcaataatagtttggcaagtatgatcaataggagtaacagaaggctgttgtaaaagttctaagctaagcgagagagtgtctgagtggttcataccggaaattgcgtactgatgaggtgaaatatagtccgatataataggcgaatctctaaaggatgggtatttaaaaataaaaaaaccttatcgaaacgataaggtttttaaatgttaagcataacttacattttattttcagttttttgtgcggtgttagttacagcatcaccagctttagagacatcttgaccaaaacccttgaacgtattacaacctgttaaaacaaatgccaccattacagatgcgactaaaacttttttcatcattttctccgtataaatttaataatgaagtaaatttagattaaaaaacaaacggaaaaagaaacatgattgtttaatagtaaaaacgttataaattgtttctataaggacgtggtctcttgtaaaataccgttatttttgatgagagaaggttttaagcttagtaaagcagggtgcctgaacatataaaatcgggtttcattaatattttgacaatataggccatcagtccaccaataagcagtgtttgaactcgctttttgatgaggacaaagccattcatgtctttctaagcggtaaaagtcagatttagggatttctgtaccccaagtacctaagcgacgttttaaatttacccattcaggaataagctgttcttgaggtaaatttagaggaagataaagttgtccttttaagacagcgaaacgttgttgaactttaaaacccaaagcttctgaaaattgaaattgtttgtcagtaaagtggtaaagctttttacttaaagtatcttgtctatttaaaccaatccattgttctaaatttaattgaccttcacctaggtaatattttagagcaacttcccaatgttcaatttcttgagtattttgatttaaaactaaaaaatcgagttcacctaaagtttttgctccatcaattttttgaatactatggcctaataactgataaggatgatattgatcttcttgtagccaaaaccaaagtaaattttcaaaacgtaaacctaagcgtgtgctcttaagccgagacataaattgaagtaaaggttctggtgcttcatcaagctgctttaggcggggtaagtaattttgaaaatgttgttcccaatttttatctgtatgtaattgaaaactatgtcgaatagtaaggctgcagggaagttggctaagtaggttcgggctggcaattgtaaaggccaattgtcttaccattgggtgactgaactgtaaccatggctcaaaataggatgttttaattgaggcaatattcatacgttgagtactcgaaataattcatccaaatttcatggtcaatcaacaaaacaataccagaaaaacactttatactacgagtaacaatagcttaaggtttatatatgcgaacattgttttggcgaactctggtcgtgatttttatcacgcttggtattattggagcaattttaccaggcatgccgacaacagtgtttcttattctggctgcttgggcggcctcaaagggatggcctcagatggatgcgtggttgttaaaccaccccaagtatggaccaaccctgcgggattggcgagcaaatgggacagtaccgcgtaaggcaaagtggattgcaaccattatgatgaccgcaagtggtattctgatgctgtttacttcggcgccgttttgggtcaaggtttttaccgatactaccatgcttgttgttgcaatttggttatggctacgtcctgagccaaaattaaaagattgataatcttttaattttggcgcaagacaagtttccccataatttttcattaaagctcaaaatagttgagttgatataagagaagaaattcgatgtcccaatttaaacttgaagatgcagatattcttatcgatttagcaaatcaaactttaagcttacctaaacataataagttttacgtggtctctactggcaaaaatggaattggggaacaagaaaatacgggtaaaaccccacgtggatggcatcgggttgctaagaaatttggtatgcaatctcccaaaaatgcagtttttattgcacggcagcccacaggtgaagtttatagcagtgaattagccgcacaatttcctgagcgagattggatattgtcacgcattctttggttagatggtttagaagagggctttaacaaaggcgaaggccacgacacgatgcaacgttatatctatattcatggtacacctgataaagaaccgatgggggttccaatgtcacatgggtgtattcgaatgcgtaatgaagaaatcattgaattgtttgatttagtctctgaagacgcattagtttatttgtctgaacaatctttaacctaaaataggattttaaagattattgtttaattagccgaatgatcaaaatattaaaataagtgcttaaataaaatacaaaaaattgttttttacttaataatgacttatttttaatcattcattcgtatttttttgaaaagttgtcgaaaagcgtttgacacctgttaaagattctctataatgcacctcacaaacgatgaagacgttaagggcgcttagctcagttggtagagcgtctgccttacaagcagaatgtcggcggttcgatcccgtcagcgcccaccaagcctttacgttaagatctcaagtgcagcggtagttcagttggttagaataccggcctgtcacgccgggggtcgcgggttcgagccccgtccgctgcgccacttaagacttaacatcgtttaccccacaattgcgatattgtgaaagtgcagcggtagttcagttggttagaataccggcctgtcacgccgggggtcgcgggttcgagccccgtccgctgcgccacttttataaaacgcttttgcagggcgcttagctcagttggtagagcgtctgccttacaagcagaatgtcggcggttcgatcccgtcagcgcccaccataatttgtgaccatactttatttttaaagtattgcaagtgcagcggtagttcagttggttagaataccggcctgtcacgccgggggtcgcgggttcgagccccgtccgctgcgccattctcttgattccctgatctagaggatgtaatgtataaagactgtgattgttgtctttttcaatcagggcgcttagctcagttggtagagcgtctgccttacaagcagaatgtcggcggttcgatcccgtcagcgcccaccataattttttcaaatttaaaaaattaaacacgctaatttatttagtgttttttgcgtttctgctcttcctattttttatctatctattttatcttttttggttaactctctcttttccatacttaatttttgagttcgaattattattactatcgagtttaactaaagctgccatgctgtaacgcaatagcagctttgtaaactaagattaatactcatttagaagccagccactagcgtatgcaaaatattcacgtagccaagcgttgtagcgagtaattaaaggtgtttctgcagcgaccatataaacctgtgtatagccttgtttctttgcaatagctgcagctcgtggtgtatggaagtcacttgtaacaattgcaatgggttgattaacattaatatgagcttgttcaagtaaaggtttactatttttaagattaagttctgtacttgtgcttttgtcttcaaggatcattcgatcttttgctatatgaaaatgttgttccaagtagcgtgacatgactaatgcttcaggttctttttcggaaaagtctaaaccgcctgttaaaataacctttgcttgcggttgtgaaagggcaactggtgctgctgtgtcaagacgctttgcaagaatagctgaaggctgtccattttcgacaccacttcctaaaacaataattgctttaactgcggggagattttgacttgcgtctttattttctttaataaaattaaaaaaatagcctaagccaattaaccaaatccagaaacacaaccacccaaaacgccaaagagtatgaagccgatagtgatagaagaaaaaccgttctaaatgataataaaataatgcataaagacagaagaatgctcctaaaactaaaggaacaagtgtgcctacatgaattttatttagaaaagctagaaataagccgtccaaaaataaaattgaaccaatgactgctaagaaaatccgaatccacttactgacttgcattgtgtttaaagctgcaatttaaattgcagacagtgtatgcaaaatcattccaaattcaatgctgattgtaataaaaagccgagtaaagcattttggctattactcggctttgttatttattgatatttaataaacatcacggcgataacggccttgttgtcttaactcatcgacttgttcttcgcctaaaatatgaataagtgcttgatcgactccacttgccattccatcaatactgccgcatacatagagtactgcaccgcgttcaatccagttgattaactccgctgcattttgtcggatgatatcttgaacataaacacgttgttcttgatcgcgtgagaatgcaagatcaagtcgttttaacattcccatcgtttgccaagcttcaatagttgatgcatagaagaaatcatgattgcgttggcgttcaccgaaaattagccagttttcagtatagttatggcgagttcgtgtatgaagtaagctcattaaaccagcgattcccgttccattaccaatacaaataattggacgattatcatcaatcaaatgaaaagactcattggtacggatacgcagtgcaacattttgattaatttctgtatgttgagtcagccaacctgatcctaaacctaaattaccagactcatcatattgttgacgaacaactagacgtaatacttgctgagaagggatgctagcaatggaatattctcgcgttggtagggtaggaagttgttctagtaaatggtccagattggcaaacggttcaatttcaccagttaaatctttattccaaagtgccttttcaatagaaacctgtagcgagtctaccaccgcatttttaagaatgtgatgatgctgtaaaaacttattaatacgctcaggactgttacctggttgtatttcagcaatgtccccagcttgccatacagcttcatgactggcagtaagttcaatattgtaggcaggctgacctagactatttggattgagtaaatcacgttgttgtaatgtccaattatcaaacactttttcgatattaacagcatgcaaatctagtttagttgcttttacaagtgcctgattccagttttgaatatctgccggatttgcattatctacttctataatatcgaagaaggctttggcaccattgtttttaagccattcatctactgtgtggccaaaactacaataagtatccggatattccttagaacctaaagctaatactgcatatttgacatgttgaagttctaagttggtttttaataactttttagcaaaattagaagctaagtcaggtgcttctccagtaccataggtgctaatcacaaataatatttgttcatgttgctgtaaatcagcttcggttaattgttgtacagatttaacctgaactggttgatgcgcctcttgtaagctcgttgcagtactccacgcgagttgttccgcaactccagtttgggtggcataagtgattaaccaaggcttagcattttggtcgatataatggcctgctaaagactggcgagccgcttgagtaagttttttttgcttacggcgtttaaggtaaagcatccatccggtaacaaagaataatggcatggctaaagaagcaagcatcgccacaaattgataaactggtccgaagaaactacctcggtgcacaggtaacatactgctcataattttttgattaagctttttatcttcataaagctccattttttcaatattggcagttttatagttatagacagcttggttacgtgcacgttcatgttgtggcgttgcatctacaaaacttaattcaatttttccatcatcttttttaggtaagttaactgttaaagtcgaataatcacgtccaatctgattattaaaaccactccaagtttggttaagtgcggtaatcagttgagcattatctagttgaattttaggcaattgatctttatttcgcccagatccactatggccttgcattttaggttgttctacacctaatactttgaacataccactacgccaccagtcatatgaccaatatagacctgtacatgcaaaaagaagataaaaaacaataacccatgtacctacaacagcgtgtaaatcccaaataaaatttcgacctttaagtttgggcttaacagcaagccattgacgtgcagagtgctttttcggccagcgtaaatataatccgctcaaaacaaaatatatgagcattaaggcacaagcaccggtaatttgtttaccgaactcaccagcagttaagtttcggtgaatttgttgtattaataaaagtagtttacgaccttgtacctctggtaatacttgagctgtataagggttaaccatcatattgtagccgcgtcgttcgccttctttttcaatgtttactacagatgaggcggtaggatctttggcaattgtaatgctattaattttaatttcaggctggattgttgtgaaatgctggtaaagctgagcaggggtaagcttaggtgagctttgtgcttgcacaacataactatctgtatttacccattttaaaatttgctgatcataagaataaattgcgcctgtaacacccataatggataagatgaggccagcactaatacccagaaaccaatgaatttgaaataaaaactttttaaacatggtcgaataatgtaaatatgatggagatcttgtaacgaagtatagccgaagattgagtagataatatggattttggagataatattaattttcattatcatttatttttagcataataaaaaacctcctgtaaaggaggctttttaaagaggtgaaattataaagttttcggttcacctacactttctttcaaatgcttacgaattgtattgaaagaaaagtttttagagtccatacgtttaggcaatatatatgcaccttgttgttcctgacctttaggatcttttactttaaagttaactaaaataaagtcaggggtgttgtaccattcatagatatttttccatccgatagttccaacaccttcttgtaagcccatttgctggcgcattacgataccgtgaggttgtacacctaagcgaatacctttgatttcctgcacaggaaactcattcatcttacgcttaacgtaccattccaaaccatatttgcggcctaggtaataaagtactacacagacaatagcaacccagcaaatcactgtagagtagttcttgataaagataagacctaaaatcgcaagggctaaaattacgcccataatcgcccagatttttgtgctgattttattggtgctgcgccagataagaagttgtgcattacgttgctcagcttctgatacctcgtaaggaacaggctgaagcgtataagcatataaagttttcgcggtcatagtgcaaataacaaattgtaaactgttttaagtttagcattaattggcataagtcaggaaaggatattatgccaatttcatactaaattctgactcaaatttataatgatgcaagttcgctagcatcattatccagatcatgacttagcctttgttttaacatactaaatcgatttaatacactgagcatcaacgataactgctgtaaaataatgagcgatttttggtcatcttcatcattttggcttaagcgctgacgtatcgtctgtagcatattttgtgccgtaagatcaggcatttcatctcttaacaaagcaccttgtatatcatctaaagcttgatctaatacgttaagaaccgcttgatcctgaatcttttctcgatgtgctccaagtgctgcgatataacttaaaaatgtatgattgaggcataaaaattcaaatatatcggatttacgagtagggtcgaagtctggctctgttgctaaagtagaaataagcgaagcgacttctgcatcagtattatgtgctgctcggcggacaatacggtaattgagggcatgattatgtccttcatgatattgttttaccacttcagctaaataattacattgtgcttgtaaggagcgtcgaatactgcgtggtaggcgacggaatttccagtcaggccaaataaaggtcacgccaaaccatgctaaagcacaaccaattagggtatcaacaaacctaggaatagccgcagcgactgccgaaccgtccagattaaagttaattaatgccaaaatggtaataaaagcagttgcttgagcatattgcttactacgtaactcgaaaaacagtacgccactcaaaattagcatgactaattgcccttccacagaaggtactaaaaatactatgctaaggccgacaataattccgactaatgtacccacaatacgtaaacgtaagcgacgttttgttgcgttaaagttaggttggctaacaaataaagctgtcaacataatccagtagccatattcgatatgagtcatttgaataaatacatatccaataaaaagaacaatcgaaacacgaatggcatgacggaacagtacagattcaggtgttagattttgttttattcgaacaacaatatcattccaaccttttagatcatcatctttaagttggttttcagcctgctttactttgtcagactgaatatgctgttccgtttctaagttgagtaattgtgagtcaatagactttaagtttcggtataaggcaaaaagagcatttacccacaataagtcatactgctgatcatttcttaactttactaaagataagcgtaaattctcgaaactctgcttaaagcgtttgttatggatatagggtttacgctgtaaaatacattcatttagctcttggcaagctttaccctgaattgccaaaatgcgctgaaacctaaataaaatatcactgtgctggaaaattttagctaacttttgatagtcgatatgggcagaatctgcacgttcatgaatatcttgtgcgacaaaataataatgtaggctacggcgagttcctttttgtccacggtcaccttttaaacgggttaaaagggcggttttaagatcattaaaaatcgttattaatttgccattttctaatgaaagatcaatcatgctttgctgataactcgcaggagtcatatcgacatcaaacaaattggatttggcaaatagaaagtcgcctaatgaagcataagaggccgcaagtttatcttgaagttggcgaaccggaaataataaaaagctaatggttgcaataagtccgtaccatgctgctcccgcaaccaaaagagctggctgaatataccactggtcaaataaatgaactcccagcatggtataaactgaaacaaccagacatccataagaaattgttgcgtaacggcggcctaatgaccctagtaaaatccagccaatacaagaggcaatcagccctagtgcaaaaagcattggataagggaaaagtaattgtacggaagctgcggtaatgaagaaaccaatataggtgtaaatcaaattcatgattcgcactgaaaagcgatcatcaatatcacttaaaccagctgcgaccacacctaaagtgaggggaattgttgctaattgatgtcctagaaaataaggcacgaacgcagttcctgaaaaggcaatcagcatccgcacgttatacataaatgaagtgttataagtcgctctttttaggcgtttaaaccaagatttcaaatgaagtccttgctgatcaacctgagtgataaaggatttgcgtatttctacaccaatgttgcacaaatcatacgatagacagtgtaagcttgtctgtatgcaaatgattgaaaaatgaaatatcgttatgtctgaacaaacagcccagcgtcaatattctattggctggattatgttgctcgctttactcacggctttagggccattatccattgatatgtacttacctgcgttgcctcaaatggcccatgattttggggtgagtacgcaaatggtagcaaacacattaccagcttatttttttggtttagccattggacaattggtgtatggacctttaagcgaccgtattggtcgaaaaaagcctctttattttgggcttgcgctttatgcagttgcaagcttgttctgtgtgctcgctacaaatgaatggagtctaattgctgcccgtattttacaagccttaggtggttgtgtgggggtggttatggctcgtgctgctatacgagatagattagatgtccaaggctcggcacaagctttttcaagcatgatgatcgtaatgggcttagcacctattttggccccgatgattggggcctggatattaatctggtttccgtggcaagcgatttttattgcgctttcaattgtaggggcaatctgttggctatgtgtacatttcttttttaaagaaactttggcagttgataagagactcaagttatctctatatcaagtggctaccttatatggtgctattttcaaagatgcaagcttccgtttacctatgtttgcaggatgtttaacaggtgcagcattattctgttatatcagttcagctccagccgtttttatggaccaatatggcttaaatcagcaagagtttgcttatgtattcgggctcaatgcttttggcattatgttaatgtcatctttaaataagcacttaaccacacgtgttgaaatcactaagcgcttaaaagcaggttcaatggtacaagtgacaggtgcaagcattgtgttgattgctggcttaatttctgcagcacctttatggctagtaatgttaggactgttcttagcaatttcaggaattggtttaactggaccaaatgctatggctctagccatgtcaaagcaaggtgctcgtgcaggaacagccagtgcaattatgggcagtatgcaatttgcttgcggtctattgggtggagtactgcttaacttccttatttggtctgcatcactcaatatgggagtgatgatggtgttatttacattaagtggttttattgttgttttaaaagcgattcgtcaagcaaaaagccaatcactctcttgattttaagagagtggcttgcttgcatctttaatcaagaaaaactgcaaaattctcaacaggctctctaggcgtaataaaggtattcacaatatgttcagggtcggcatgacctagtgcaattgcacataccaactcttcgtcatctgctgcgcctaaaatatctaacactagcggatggaaatggttccaagctgcttgagggcaggtgtctaatccccgagccttggcagcgaccatgacattttgaatcatcatggcgatatccattttggaaccaattcccattgctttattgactgtaaagaaaattccgactggagcatcaaacagtttgaagttacgtaactgttgagcagccattttttctttttcaccttttttaatatctaacaaaccgtagagtccccaaccattttcacggcggcggtcaataaaaggagagacccatttttcagggtaatatgcaaaagtttctttatattgctctgcaagttcgggatttttggaaacctcaatctgtgctgcacaaacacgctctaccatttcatcacgtttatgacctgtaactacataaactttccacggttgagtgttggtaccagaaggtgctcgacttgcgactcttaatatatctttaatgacttctggctcaatgggagtgcttaaaaaagcacggacagaatgtcgagaggtaattgcttcgtcaacaaggcggacttgttccaaattcatgagtactcctgatctttttcctcaatatttaatactttttgagatgcaattttatatgctgaaattgctgtatttataagcaaaaaatattagaaaacagatatccttatatatatgattaatgacttgggtaagacatgatgtctgctcaatgataattcgaatatgccactttaggcttaaaatggtaaagtggtgcgactttgatagtcattcgattaaagccaaaataagggttgagtgaaaattgctcaattagaaaaaaggtataatatgtttaaaaacagtacaaaacagatgtttttgcataaaaaataatcttaagtagcataaacttttaatgaaaaacatacacaaaattttaaatttctgcataataccgacttttttacgcaggtatgatttctccatactcacgttaggaaaaaagtagtggctgcaaataaaatacttttacagaaaggattttgtgcagaaatggagaaatacacgaggtataaggagctttacatgagtttaccgctcatcaacaagcagttcatgaaacaaggattggcgattaccattgcaaccatgaaaatgaacgtaactcacgcaactactgagccacaagaaatacaacagcttggtacagatctcaatgcactcttctttaatgaaaaagaaaagggtacagatagtcgtgttatgacgatggcttgttacagtctttgaaatttaaatccagtttagacattcgcccaaaagtatatgtaaatatgcttattggcttaaatccagtttttataactcgattaattgatgggaatcattaaacgagctgatttagcggtggtcatttgttagtttccaagtttgtagccgagtcgatgcattctgttcacccaaatgggaatatgttcagtggtgcgatgaatttattttatctgaagggtgctttctctcatgtaaccttcaaaggcttagtgctgggcatgatgttgcttaaacttgtgacggtaattgctattcaagtgacattaaaagtttttccttaaatgtactgaagaagtccctatttttaggggcttttttgtttattgcagtattttggcttgtgctaatagcacattagcaagaacgtaagcggaccgagtatgaatgaacaactcaatgccacactgatgtcgtgggtacaattttttaatgaacctttatgggattttctggttattttcttgctggccgtcggtattttttatacggtcttaacaggagcagtgcaaattcgcatgttcttgcaaagtattcgtgttatgaaaagcagccgtacagaaggcgaagatgagcatggccttacacctttccaagcgtttgtaactggtcttgcgagccgtgttggggtgggtaacattgctggtgtggcaattgcgatcgcaattggtggcccaggcgccgtgttctggatgtgggtaaccgctgtacttggtatgagctctgcttttatcgaatctactcttgctcaactttttaaggtgagagacagtaatagcaagcaattccgcggtggtccagcctactatattactcaaggtttacgtagtaaaacttttggtgtgatcttcgcattagcattgatctttacttatggttttgtatttaactcagttcaaatcaatgcaattgctaatgcatcttcacatgcttggggttgggataaagctaatcttattgcgcatttaggtggtgttgatttagaaatttcatgggttggtcttgctcttgttgtgatggttgcattagcaatctttggtggtattaaacgtatcgctaaattcgcagagatgtttgttcctttaaaagcaggcctttatctctctgtagcgttatatattgcattaagcaactatgcgattttacctgatgttttaaaactgattgtgactgaagctttccactttaatgctgcggcaggtggtttcttcggtgctgctgtatcaatggcaatgatgcaagggattaagcgcgggttgttctcaaacgaagcaggtatgggttctgcaccaaatgcggcggctgcgtctgatgtaaaacatcctgtaaaccagggtttggtacaaatgcttggtgtattcgtagatacattcattgtatgtacaagtacagcaatcatcattttagtttctggtgtttaccaagatgctggtttcgtcggggttgaattaacccaacgtgcactagagactcaagtggggcactggggagctgacttcttagctgttctattattcttgttctgttactcagctgtactaggtaactatgcttatgcagaaagtaacgtacagttcattaataacaacccgaaagtcatgttcatcttccgtatttttgtattggtgatggtgtatttcggtgcaattggtagtgtgccattagtatggtcaatggcagacttgtttatgggtattatggctaccattaacttggtcgcaattttactcttaacaccaatggctcgtactttattgaaagattaccgagcgcaattgaagcaaggtattaaagaacctgtatttaaaattaataaatatccagagttgaagaaaaaagtcgattcagatatttggtaattttgtaagaaaagcctcttagaaataaggggctttttttcggcataataaaaatgcttgagtataaaaattaaacatgacaaattaaataaattcactacagcatttcacaaaacgagcaactaaaattgcaattcgaaaattaacgtcatagtgcaaagatgggccatgaaacagcttaaattgtgggttctcggactttctatggtgttggccgggtgccaaaccacctcacacttatctgccttaaaaccgcaaacggcagaggcatactcacgtttcgtcgatcagccttttgcacagcttaagaagcagcataagaaaccagtagtcgcattagtactaggtagtggtggtgcacgaggttatgcacatattggtgttattgaagttttagaacagcatggtatccgtcctgatttcattgttggaaccagtgcaggaagtattgttggggcaatttatgcgagtggaaaaacgcctgatgaacttcgcgatactgcattgaaaatgaaagctgcagatgttcgtgacatcagtattggtttaaaaggtttttttgatggcaaaaaagttgaagactacgtaaatcagcaagtaaataacttgccgctcgaaaaaatgaaaattccgatgtatgtagtggcaacagagctaaagcatggcaccaaaaccgtatttaattatggcaatacgggacaggccgtgagagcatcagcctcaataccaagcatgtttgtaccgactaaaattggtaaatctgaatatgtagatggcggtttagtcagtccggtacctgttgaagtagcccgtgatttaggagccgatgtcattattgctgtcgatattctggctcaacccatttatacggaaacctcaaatgtatggggactctttaaccagaatattaatattatgcaaggacgtttggctgccgaagaacttcaatatgcagatgtagtaattcaaccggatttaagagaaaaagcacatatttttgatgtaaaaggccgtgaagcaaccatgaaggcaggcatagatgcagcaaatgcaaaactgtctgatattcagtttgcgattgatgaaaaaatagctgaacagaatctatctactgacggtttaagtgcgcaaacgcaataaattaaaagcaagtatatgaaaaattaagtaaaagcccgctaagggcttttttgttgaaaaataaaagatttgtatgtgctgacaaaaatttttgtatagtggagctatgctgaaaactactcatgacacatatgagatattcatgctatttttcaaaaaaataattgatttgtaacatattgaggccagctacttagatgattcagcaacaggtaaaaaatgagtttccaacattagaagatatacatgccgctgcagagcgtttagatggtttagttgttaaaacaccttttgttttttcagaaaccatttctaaaactttaggggctgaaatgtggctgaaatttgagaatctacagtttacggcttcgtttaaagaaaggggcgcattaaataaacttttgagcttatctgaacaagaaaaacaacatggtgtaattgcagcttcagctggtaatcatgcgcaaggggtcgcttatcatgcacagcgcacaggagtcacggcaactattgttatgccaaaatcgacgcccaatgtgaaggtgcaacgagtacgtgaatacggtgcgcgtgttattttgcatggacaagacttttcggaagctgctgctgaaatgcaccgtgtggcacaagaagaatctttaaccattattcatccatttgatgatgctgaaattattgcgggtcaaggtactatcgcgctcgaaatgctggaagctgttcctgatttagatatcttggtcgtacctattggaggtggtggtctcatttctggtattgcgattgctgcaaaatcaataaatcctaaaatcaagattattggagttcagtcggttgtttatccaagtatggcgaaactgctttgtaactatcaactcgcggtttcaatgggttcaacggtagctgaaggtattgcggttaaaactccgggtgagctgaccacacaaattgctaagcattttgtagatgatattgtggtagtcactgaagatatgattgaagaagcgattgcgctattactcaacattgaaaaaacagtgtgtgaaggagctggcgcaactggaattgctgcaattatgtctcgtcccgatctatttttaggtcataaagttggtgtggtgttatctggtggcaatattgatacacgcgtaatggtttcagtattacagcgtcacttaactcgtactggccgtatggttcgtattcgcgttgaattaccagataatccgggtgccttagcgcgtctaacagcaattattgcggagcagggcggtaatatttatgaacttcgacatgaacgctttgcagcaacaagccgtgctaaagaaagtgcggtgagtgtcgatattgaactaaaaagcgctccagatctggaaccattaattcaggctatgcaacttgaaggctatattgttcgtaaagaagagatttaaacgtacatatggctgtgatataaaaactgtatatggctcttaggggagccatatacaaagcaatttaaacggattaaattgcataaagggatgaatttacaaaaaaacgatcaaatccttcaatgaaatgggaaaaattgacaattctctaaactttagccttcacaattttaaggtttaggttttagtattcctttcattgtaaatttgaagaaatatagggatatcaacactcaatgttcaaatcattttttccatcaccacgatatttctttatatctgcggttatttggctcgcgctaaatatggtgctctggtatacagggggagatcactggggacagtatcttggctttcctcaggggtatgcagatgctgagttgcctattggggtaagtcgcttctggtcgcctgcttttttatggttttacctctggtttttagtctccacagcactgtttgctagcttttggaaaattatatcgaataacccatggcagcgttggtctatctggggctcggcttttattttatttaatatctggtttagtgttcaggtcagtgttgccattaatgcatggtatgtaccattttgggatttaatccaacaaatgctttcaagtggagggggagatctctctgcactttatagtgaaactctagtctttctttacattgcaatggttgctgtgactttagctgtgattaatgctttttttacaagtcactatgtatttcgttggcgtacggcaatgaatgaatattacacggagcattgggaaaagcttcgccatattgagggtgcttcacagcgtgtacaagaagataccatgcgctttgcaacaattttggaagacttaggggttgagctggtcaaagcagttattacattaattgctttcttaccaattttatttcagctttctaaacatgttccagttttaccaattgtcggcgagctagaacactccttggtatgggccgcaattgtatggtcaatttttggtactgtcctactcatggtggttggtattaaattacccggtctacaatttaataaccaaaaagtagaagcagcttaccgtaaagaattggtttatggtgaggatcatgcagatcgtgcaaaacctgctactttacgtgagttatttagtaatgtacgtaagaactatttcagactttacttccactatgcctattttaatatgacagcgatttggtatggacagcttgatattctctataatttggttgttcttttcccatcgattgctgctggtaaactcacattaggtttaattcaacaaattgcgaatgtatttggacgcgtacgtgaatcatttcaatatttaattacttcttggaagacgattattgaactactttcaatttataagcgtttaaaagctttcgaatcgatattacataagtaaaaagagcccgcgaaagcgggtttttttatgattattgatttaatgggttgcattataaaaattaaggatagggccaactagagactgctgcgacttatctaaggtgacttgaatctctttatagttaaaagtgtcttcatcatcatacttggcaataccatgggttttattgttcacttgaggaatttggtagctaaaaaaagcgacttttttagagggatgaacaatattgataaggtttttagggtctttaaaaccaccatattcattttcaagactttcttttaatagttcaggaaaataaagcgttgcattgggtaatccacatccaacgcaaaatgaagagtcataaagctttatcgcttgcttttgatctggactcatgattagagcaaaaccagttccatttgcgcctgcatttgcttgaatatcttgccagttacgtggaacaagtactacacctacttcaggtaatgcaagaagctttaattgcttggcatgttgagcatcaagtttaaaattaaaactacagcttttaggcgtgcatttttcaaaacttttaagtaaaccatcttctattgggttttgtgccgtaatgccataaaaagggactgcaacgccgtttaaaaattttgcctctccaagagcatagaattgattgtctgctttgcgggttgtagcagagctataaaatttggggaaatgaggagtaaagctttttacttctgcataagcagttgaatttaggctgactaatgttgcccataataaaaaatttagttttttcatttttagaaagtaatcaatttaaattttatataaatctaacatattcttttaaactaggcggtaactcaaaatttaacactgttgttaacttcataataaaacagacgtgtagagacatgaaaaaatgaaaaatatactttcaatttgttgtttggcagtaataagttcttatagttttgctcaagatataaaaggtatttcattttctcaccaagagtgggaaatctcttgcagtaatacgggtacctgtaaggctgcaggctatcaaaacgaagaaaatggtgataatcccgcttcaattttattaacacgtaaagcaggcccaaaacaacctgtacagattggatttgctttgtctgactatgaacaaagcatacctgcaaaccagcttaaaaatatccatttttatataaatggcaaagatttaggtgcagtgggtgtggacggtactgagctgccaattatgggtaagctaaacagctcgcaagtcaatgctctactacagcagtccaaacagaagactgaaattgtatttaaaaatgcgcagcataaatggaaagtttccgatgctgggatgactgccgtattattaaagatggatgattttcagaagcgtatagggactattggtgctttggttaaaaagggcagtgccaatgaaaatcaagtgcttatgcctgaaccaaaactagttgtgaagcgtattaagacttcaaccaaaccttatttaactttacagcctaaaaataaacattaccaagcaatacaccgtagtttgatggctgctaaaccgaatccgaaagaagacggcttttgtaaaggtatttatggtggtaacagtgatggagccgaaccacagaaaattgagctatataaattaaccaataagaaagttctggcgactacattgtgctggagaggggcttataacgaagggtatggggcatgggtactcgatgagtctttaaacggtaaggccgcgtttgtgactgagtccgcctcagattttgatagcggtattattagtagtgctcaaaagggacgaggcattggagattgctgggcaagtgaagagtgggtatgggacggcaagagttttgtgcatactaaggatatgtggacgggtatgtgtaaaggcttggcagcaggtggagtgtgggagcttgatcgaatagagtctgtggtgaaatgactactttgtggttacagagtcataacaggtaactttagtgactctgtgataaaaagaacagattgtttattggagctagacctatgtcacgtcatctttatgctattgctcgccgtaagttttcacatctgagccgttcaatatatgtggcggcgactgtactgggtgtaacacaaattgcgatggctggtccaacagttgatcagctcagtgattgtttagttaaagcaacgacagcttcggataaaaccacagtgctccaatggacatttacagctttagcagctcatcctgatttaaaagcatttagtaatgtaacgcctgagcaaaaggatcagttagatcaaaaactggctcaggttttacagcggataattgtagagcaatgttctgctcagaccaaagctgtaattcaggctgaaggtgtgaaggctgttggggaggctttccagcagttaggccaaagtgcgggtgaagatattgttaaagacccagccgttaaacagcagttgcagggcacattacgctacatcgatttaaataaattggtgacaacgtttttaacaccagaaatttggaataagttgggaattacaagataaaaatctagttttctattttagtaataaagcctgctatctaaatgcaggctttattgtatttggggtgaagaatcttatttagatactaatcttagcgcctaaaactttcacaaattgtgctaaccaagctggatgtgcaggccaagctggagcagtcaccaaatgaccatctgtaactgcttcagtcacagcaatatctgcgtattgtccacctgccaattttacttcagccgcacatgctggataagccgagcagaggcggtcttttaaaatgtctgctgcagcgagtaactgagcaccgtggcatacggctgcaattggttttttcactctatcgaattcacgtacaatttcgacaacacgttcattcatgcgtaaatactctggcgcacgaccacctgggatgactaaacctacatagtcttcggtattaacggcatcgaaatcatagttaatcgcgaagttgtggccacgtttttcgctataagtttgctcaccttcaaaatcatgaatagccgtcgcaatatgatcgccgttttttttatttgggcaaaccgcatgcacggtataacccaaaccagttaagaactggaaaggaaccatagtttcatagtcttctgcatagtcaccgaccaacattaaaatctttttagacatgatttatctctcttatttaaaatatatgtgatttcaatttgtaatttaaattagcacaatgaaagtatgatttttagcaaaaagtgcattctttagtcgaagggtggctgaagttagggggtgagaataacaaatacagtttttgataattcactggtattagttacgtgataggctacatggatgtcgccgttaggcagaggtatcagagatgtgccttctgcctaacagatggttttgttacttttgccaaaacaaaagtaaagctattttttttaaccaaatttctgattatctaggaaagtaattaaatctttatttgagttaatttcatcggcttttatttttgatattatttttattatactcatagctaagtagtatcttatttgctttaactctttggtttcaatatttatgtttccaccatgtgcaataccactacgttttgcatataaattgcacatagtgttgtaaactagttttctactttcaatgtcatctttagctattaaaaaagcagtgttttcagctaatacttttgtaatggagtctctacctgtagttaataatgattccattccaatagcacagaataaaaagctctcatttaaactttccgaattaatggatgcactataccaatttatagaaacacgcaatttctctaataagtcattgttaaagctattagttagtataggaaagcataattctttaaatttagaaccaatattacttagactatctatattattcctttgtgaaaagctaaaatcgacattgtaaataatttcatcacttaatgcgctagtacttaattcgtcataatttacgcataatggttgaattctatctttaacttcataagtatgtacttgaatgtggaatttataactttttgatatatgagtgatgaaaataatttgatttattaactctttagcatcatttttacttttttctttggccattaatgggtcgccaagattagaaatctcaataactgttttatttttatatttttttattgtattttttagctcttttaaaaatatatctttgggattaaatgtcccatttctttttcgctcatctatgactagttttatatttttatttattttttctgagaaagaaatgttgtttgagtttttttcattaaaatttccaagagttatattttcaaatgaatatattttatcgcagtttaatccttggataatgaaatagaagaaattagttttttgactataaattttcagttctgaaataactttattaaactcagaaaatatatctaaactactattctgaacatattctttgaatagtttttttatttttttatctatagtttccaaagctattaaatcaattagattggttgtttttaatatagaggtaagaaatacagtccaattaagagatgtttctattgagaaaccgtaacttatatcacttaaagtagcaaagccgcctgaagccatggctgtatgaaaatcaagcatattgtctttaaaataatcaaaatatgtaattatagatcttggtctatctatttttattttattaaaatccataaaaaaccccactttaagtgaggtttttatcgcataaaaacaatgaattagtcaataaatcaaccaatcaattttttcattaattcattgacttgcgcaggattagctttacccttagatgctttcatgacttgaccaacaagaccgttaaaggctttttctttaccagacttgtactcttcaaccattttttcattggctgcaagtacttctttaatgattgcttcaattgcaccagtatcggtttcttgctttaagcctttttccgcaataatgtcatcggcagatttaccttcagattcccacataaagccaaagacttgtttagcaattttaccgctaatggtgttgtcgataatacgcgcaatcatgccgccaagctgttcagcagaaacaggtgagtctgttaactctaagcccgctttgtttaaagcaccagagaattcacccattacccagtttgcagcaattttaccttgcttcgcaccgccagccgcagcaacaacagcttcatagaagtccgccatttcgcgtgagagcgtaagtacgtgtgcgtcgtattcagttacgccaaagtctgcaataaagcgtgcacggcgtgctgctggcaactcaggcatagttgctttgatggcctcaatttgctcatctggaataattactggtagcaagtctggatcagggaagtagcggtagtcatttgcttcttctttagaacgcatagaacgcgtttccattttatttggatcgaacaaacgggtttcttgatcaatttcgccgccccattccaaaatttccatttggcgttcaatttcaacattgatcgcttgctcaatgaaacggaatgagttgaggtttttaagctcacagcgtgtgccaaacggttgtcctggacgacgtaaagacacgttacaatccgcacggaatgaaccttcagccatgttgccgtcagaaatacctaaccaacgtactagtgtgtgaattgctttgatgtaggcaactgcttcttcaaccgaacgcatgtctggttcagaaacgatttcaagcaaaggcgtaccagcacggtttaagtcaatgccagacataccttcaaattggtcgtgcacagacttacccgcatcttcttcaaggtgagcacgagttacgccaatgcgtttagtcgtaccatcttcaagctgaatgtcgatatggcccaagcccacaatcggattgtccatttggctaatttgatagccttttggagagtcaggatagaagtagtttttacgtgcaaatactgaagcttggtcgatgtaagcatcaatccctaaaccaaaacgaattgcgagttcaaccactttttcatttaaaaccggcaatacacccggcatcgccaagtctacaaggctcgcttgtgtatttgggtcttgaccaaattcagttgatgaacctgagaaaattttagaattggttgcaagctgagtatgaatctcaataccaataacgacttcccaaccgtcaatcaatttcaacttttgagcttcagccattatgcattctcctcagcaattgccgcacgtttggtgtgccagtcagtgttttgttggtattggtgaacaatcgacaacaattgtgattctgaccagtaattaccgattaactgtaaacctactggtaagttgtctttatcaaaaccaacaggagcattaatcgctggcaagcctgctaagttcactgcgatggtatagatatcgcctaagtacatttcaacagggtctaaagatgcaccaattttgtaggcagttgttggtgcagcaggtgctgcaattacatctacattttcaaaagcttttaagaagtcttgttgaattaaacgacgtactttttgtgcttttacatagtaagcatcgtaataacccgcagaaagcgcgtatgtaccaattaaaatacggcgttgaacttctggaccgaaaccttctgaacgcgaacgtttgtaaagatccatcaagtcagctgggttttcacagcggtaaccgtagcgaacaccgtcataacgtgacaagttagaagatgcttccgctggcgcgatgaggtaatacgttggtacataagcttcagtcatgttgaggtcgatttcaacaagcgctgcgcccatttcttcaagctttttcaaagactcttcaacacgtgcttttacgtccgcatctaaacctgcaacgttaaagtattgtttaggaataccaatgcgtaagccttttacagatgtgttatttaggtttgcaacgtaatcatcgacttcttttttaaccgaagttgagtctttagcatcgtgacctgcaattacattcatcaggtaagcacagtcttcagcagagcgtgccattggacctgcttggtctaatgatgatgcataagcaatgatcccgaaacgagatacacgaccataagttggttttaagcctgttaaaccacagaaagaagcaggttggcgaattgagccacctgtatcggtacctgtagcaaatggtgctaaatcagccgctacagccgcagcagaaccaccagatgaaccgccaggaacatggtcaagtgcccaagggttactcgttgcacctacatatgaactctcagaagttgagcccatcgcaaactcatccatgttcactttacctaaagtaaccagaccagctgctttagttttttcaacaacggttgcatcgtaaggtgaaatgaagttatcgagcatttttgaaccagcagtggttttaatacctttggtacaaaagatgtctttgtgggcaagaggaatacccgttaaagcagttgcattgccagcttttaatgcggcatcggcagcatcggcttcgcgaagtgcctgttctggagtaaccgtcacatagctcttaacttgcggatcgattttagcaatacgttttaaataatgttcagtcaattcgcgagatgaaaacttcgcttggcttaagccttcagcaagttcgcgaattgataagcgatgtaaatcagtcatgagtaaaatttctttacattcaaaatagggaagatgggttaattgattaaaagttattcaatcacgcgaggaacaagatacaaaccatcttgagttgcaggtgcaactgcttggtattcgtcccgatgattgctttcagttaccacatcagcacgtaaaggttgaggattgtcaaaaggactctttaaaggttctacgccttccgtatcaatgccttttaaggtttccatcatgcctaaaattttatttagactttgagcatattcagcagattgcgtatcattgagcgacaatcgagcaagattggcgattgctgaaactgtttgtgcatttaaatctgctgaatgctgtgcatccgatgtagacataacatcacctaatcagtattaaaaattttcaaaatatcgtgcgttataataagcgattgacttgttcaaatcatcacatttagtttaaagttgccaccttgcatccacatgaaagtttaactgagaacgaaccgtgattctaaaacgactaattggcttgttttcgccggatctagccattgatttaggtacagcaaatacacttatttatgcaccaggccgcggcattatattaaatgaaccaacagttgtggcaattcgtcacagtggttcacaaaaaattgttgctgctgtagggctagatgctaagcaaatgctaggccgtacacctgcgaatatttctgcaattcgtccaatgaaagacggtgtaattgcagattttgaagtgactgaaaccatgttgaatcagtttattggtaaagttcacgaaaaacgtttgttcccacctgcacctcgtgtagttgtatgtgtaccatgtaaatcaactttggtcgagcgccgtgcaattcgcgaagccgtatttaatgcgggtgctcgtgatgtacgcctaattgaagagccaatggctgctgcaattggtgctggcatgccagttgaacaagcatgtggttctatggttgtggatgttggtggtggtacaactgaaattgcaattatttcattgcaaggttgtgtctatgctgattctttacgtattggtggcgatgtatttgatgagcaaattatcaattatgttcgtaaagctcacggttgcgtaattggtgaaaccacagctgaaattattaaaaaagaagttggtatggctgtttctgatggtacgacattagaaattgaagtacgtggccgtaaccttgcagaaggtgtacctcgtgcaattaccgtaacttctgacgaaattactcaagcaatttctgacccgttacaaagtattgtaagcgcggtgaaatctgcacttgaacaaactcctcctgaactttcttctgatattgctgagcgcggtattgtgttgacaggtggtggagcgttacttcgtaaccttgataaattattagctcaagaaaccggtttaccagttgttgttgctgaagaccctcttacttgtgtaacccgtggtggtggtaaagtattggaattcttcgacaacccgaaccatgacatgcttttcgtcggttaagtttaaggattaggcggtgcaaccgaatattttttcaagacagccgccatctttccgctcgttcattattgcggtcattacatgcttggtggtgctgttctttgattggcgcatgccttatgtaattcagccagcaagggatgtcttgtacgctgcatataatccaatatatgcacttgcaagttatccggtactgtcgagagaatggctgaatcaacaaactaaatctgaaacacaactgcgccgtgaaaacactgcaatgcaggctgagctattacaggctcaggtccgcttgcagaagctgtctgaattatctgctgaaaatacccgcttacgtggtttactcgatacaccattaattattgatggtcgtatggaaattgcggaagtgattgggacagatgccgatccacttcgtcacattattattatcaaccgtggtgcaatggatcatcttaaagttggtcaaacggttttagatgataaagggattatggggcaaattatcaatgtatatcctcatagttcacgtgtgatgctgctttctgacaaagagcattctctatctgttcgtttagagcgtacaggtatgcgtgcaattgtctcgggtactggtgatttaggccgtttaaaaatggaatatgtgccaacgagtgcaaatattcaggtcggcgataaagtattaagttcaggcttaggtgagcattttccagcaggttatgccgtgggtacggtggctaaaatccgtcgccataattcaggtgagtttgctgaaattgatgttacaccagcagcacaattagcaactggtcatcatgttgttgtacttttctctgactcattagcgaaggagcaaccatatgccgatcgctaagttgaaacgtgagaagcgtaaagatccattatggggaattattctctctataatcgtggggtctgtcctcatgatctatccattatcttacgacatctcgggctggcgaccattgttcatgcttatgatcatgttgttttgggttgtgtgccagccaacatggtgtggggtgtggttcgcatttggtatggggatttttacagatctattgcttgatgcacctttaggattaaatgcactgagttttgttattgtcacgtttattacccgatttttaatacgcgaacgccgtattttgacttttggtaatttatggacgattgctacattggtgattattgctcacttagcgtttatgtgggtgactcaaacgatggggggcattcatttttcgattgctcgacattggcaaccattgatgacaagtatcttaacctggcctgttgtctattattgtttagcaaaatggcgcatttagttttagcttctagttctccgcgtcggagagagttgttgcaacaactgggcttaaattttgaaatctatagcccggatattgatgaatctgttcatgaaggtgagctggttcaccaatatgtagagcggttagcgagagaaaaagcccaagctgtattaaacatttttccagattcagtgattattgcagcagatacgagccttggtctggatggtcagattattggtaaacctgactcaaagcagcatgcctttgacatctggaaacaattatctggtcgttggcatgatgtattttccggaatttgtattgcaacacagcaacacatcttaagtcaggtggtgcagacccaagttgagtttgcatctctaactacgcaagatatggaagattactgggccacaggagaacctgtagggaaggccggtgcatatgcaattcaaggaattgcttcacaatatattcccaaaattcaaggaagttatagtaatgtggtagggcttcctttgtacgaattttcacagttattcaaaagagtgaagacataaggggttgttgataattcttgattgaattgcattgtcgatgaacaatggacaaagctacattaacagtccctctgactctttaataaaaattttataatgctttgagtttatgtatgtcagaagaactacttattaatgtcacacctatggagtgtcgggtggcattaatcgaaaatggaactgttaatgagctgtatgttgaacgtacagttaaacgtggacttgtcggcaatatctacaaaggtaaagttgtacgcgtgcttccgggtatgcaagcggcctttgttgatatcggtttatccagaacggcctttttgcatattaatgatatggtttggccacgttcacagccaactccaaatgtgtttgaactacttcatccagggcagattcttaccgttcaggtgatgaaggatatgctcggtactaaaggtgctcgcctgagcacagatctttcaattccttctcgctatttagttcttatgccatatggtaaccatattggtgtttctcagcgcattgagtctgaagaagagcgtgatcggctacgtaatattattgagagcattcaggcggagcataatttacccggtagcgtaattgttcgtactgctgctgaaggggtagatgaagccgaaattgcacaagatatgtgctacctcagtaagttatgggaatatattcagcgtaagcaagttgatgtggcagtaccttccttaatttttgaggaactaccgctaccgcaacgaattatccgtgatctggcaagtgaagaaaccgcaaagatttatgtcgattcgagagagattcatggaaaactgcgtgagtttgtagatgagtttgttccgaatatgcaaagtcgcctgattcattacccgggtgagcgtccattatttgatctttacaacgttgaagaagatatccaaaaagcactgcaaacacgtgttgctttaaagtctggcggttatttaatgattgaccagactgaggcgatgaccacaatagatgtcaatacaggctcttatgttggtggccgtagccttgaagacactgtctttaagaccaatatggaagcgactcaggtgattgcgcgtcagcttagactacgaaatctaggcggcattatcattattgattttattgacatgcaagaagcgattcatcgtgaagaagtgatgcgtcaatttgaaaaaatgcttgaacgtgatcatgccaagaccaaaatcacacaggtttctgaacttggtctggtagaaatgacacgtaaacgtacacgtgaatcattagaacacttgttatgtgaatcgtgtccaacgtgtcaggggcgtggttttgtcaaaactgcagagacagtgtgttacgaaatatttcgagagatattacgctacacccgtgcatttgagtctacgagtggctttactgtcgttgctcatccatccgtgattgaccgattattaacagcagaagcacctgcagtggcggatttagagcattttatcaacagagttattaaatttcaggtcgaaaatttatatacgcaagagcaatacgatatcattttaagttaaagttgtaacaagatatcgcttaatccttgttacaactgaaattttactttcattcatgaattttaaatactacttacatacagtagccctagacgttctccctattaaacgtcttagcaaacaataagaggtataacccatgaatgtaagtgaaaacttaattagcaacggtcttaaacatgttttagaaagcacgccagtcaatagctgctatatgttgaatgaccaaggtaaagaagtaccaatcacaactgcaatgattcgttcagtatgtcatcagttacttaaccagtgccgcgcaattaaaaaataaggggccattttaaagccccttaatttttcctaactcgctgaatgatgtttcagctgtttctcttcaataatttcttcaaaccgttgaatctcatcttcaagatgcgttaaaaggttttgcattttaggtaaagcatttcgacatgctgttaaacctacttcaagcttatccagatagcttgtcattgtaatattgagcgcttgcccgtccatgacaatagaagcagggtagagtgcatctaatttcgcaccattccaataaagcggctcacgtgggccaggtacattggaaatcactaaattgaatgcctgacgcttaggaagcatccccgacatgatgttaagtccagctggaccataaacaacagcgctatagtttaaaatctcattcgcggtcatgcggctaaagcgttgctttgaattttgcatactacgacgaatgatctcgagccgctctagaggctgatctttatgggttcctaaatttgccaaaatcatggtaatacgattgctcacgtcagagtcatctgtgcgtagggaagcaggaaccatggcaataagaggctttctaggcaggctgttgtgactaattagatattcacgtaatgccccagaacacacagcaagtacgacgtcattgatcgttacaccaagtgctttagaaatttttctaagacggcttaattcaaaagattgggctgcaaagcgacgtgaagcacttacacgttgatttaaaattgaaaccggagcttgaaaggtagagacgtaatcaggatttttacccatttctttaaaaatggtttgcgataattcctgcatgactttaggggtcacctcaagttgtgatttgataccacctaaaatacttttgatcttacttgtacttggttttggtacttttaagcgttttgttcttttactttctacacaccaaagtggaaccacatgtttttcttccggcgtttttgacagcgacttctcaattaagcgcatgcctgcaacaccatcaaccatggcatgatgaatcttaaagtacatcgcgaaacgattgccttcgatcccttcaataatgtcacacgtccaaagtggttttgcacgatcaattaaagagctgtgctgctgggaaatataaaccagtaattcacgaattcgaccaggatgaggcaaggcaatatggcgaaaatggtggtcgatatcgaactcttcatcttcatcccaaaatagaccatttaaacggttattgaagggtggaacaggaatacttttagattggcgtatttcttctactaaatcgtgaacgaaagtttcaggggcattttcaggtatttcaaataaaaacaagccgccaacatgcatcggttgttgtcttttttctagtgatagaaaaataaaatcaatagggtgtaatggacgcataactcgttgtgcctcatgcttttttctaagaagcccttaactgagctcttattagaattatagaaccgtaaatttagtatatagcgtttattacagattaaatatgactttgtgtacgagatataactgtaaaaaaaaccactgattcatcagtggtttttttataccgaactattttttcaagttacctgcatgtaagccacattctttttgtgttgcttcttcccaccaccaacggccttcacgttcatgttgatttggaagtactggacgtgtacatggctcacaaccaattgaaacaaaaccacgctcgtgtagagggttatatggaatttccatcatgcggatataactccacacatcggcgctagaccagttcgcaagcggattatatttaataagttgcttacccggaccagagaagcctgcatcagcttgtaccactggaatttcagtacgtgtaccagggctctgatctttacgctgacctgtaatccaaccatctaaggtcgctagtttcttacgtaaaggttgaacttttcgaatgccacagcattcttgatgtccatctttaaagaaactaaataagcctttttcattcaccatgctttgcacagcttccgcatcagggaaacaaatctcgatattaatattgtagtgcttacgaacagtttcaataaattgataagtttcagggtgtagacggcctgtatcaagactaaaaacacggaaaggtttacctaaacgtgaagccatatcaattaagactacatcttctgctccagagaacgaaattgcgatctcaccttgttggcttaatgcaagttctagaatctcgcgcggacttttagctgcatattcagccgcgagagcatcaacgatatcaatagtcggaataacggtcatgggtgttcctggcaaaaggcttgggcgcattgagttatgaaaaatattctaaaggatagtgaataaattgcttagcactttaatttcgatccttatgaataaaattgatttgatcaataacaacgcaaaactgaaaatcttaatggtatgatacagcaatttttaaccaacgttggaagcattcatggaaatcgtatgcctagatcttgaaggagttttagttcctgaaatttggatcaatttcgcaaaaaaaacagggattaaagaactagaagcaacaactcgtgatattccggattatgatgttttaatgactcagcgtttgaatatcctaaaacaacacggtttaggcttaaaagacatccaagaagttattgccgagatggggccactaccaggtgcaaaagagtttgttgaatgggtgagcaatcatttccagctggtcattttgtcggatactttctatgagtttgctcatcctttaatgaagcaattaggctggccaacaattttctgtcataaattagagacagatgaaaatggtatgattaccgcttataaacttcgccaacctgaccaaaagcgtgagtcggttaaagcactacatggtttgaatttccgtgtgattgcagcaggtgattcatataatgatacaacgatgcttggtgaagccgaccatggtttcttgtttgatgcgcctgcaaatgttattgcggagtttcctcagtttcctgcaatcaatggttatgatgcattaaaagaagcaatccgttctgtttcacagcgcaatattcctgcttaagcaaggacaaatacacaataaaaaaggcgcttatagcgccttttttatttagattggtttttgaaacttagaatttataaccaagttttaaaccgtaagcgatagcattgttatcagagaagtctgcaacatattcatcgctacctgcttgcgcgcctgtttgagctttggcatcacccaaccagaagtattttacgccaccagcgatgaaagtttgtggagtagggctatattgaacacctaaacctacgttccagtaaccttctgttggtcctaatgttgttacaggattacctgcaccagagtcccaacctacagaaacattaccagcccatttatcattaagtttacggcctacaccagcgttcacagaccattggtcatcagaatattcaactaggttgaagccatttggacgcccaacaagaccacctacagcttctgagactttgccaaatttatatggttgaattgagaaatctttccagttcacccagcgtacattggcaaacgcaactgtatccgccatgatacctgtctgaaaatcaaggttaacagactgtggcgttgtgattgtagttttaccagatgaattaattgcttgaagtttagatgctggaacatctaaaccagccagtactgaagtaagaccagggaaatttaatatagataaattttcatcaatatttactttgtgatcaatttcagaacgataagttacagatgctctaagtgcgatttcaggaatctgataagcagcacctgctaaccaaccagcacctgtagtttctttaatatttgcatcataaccattataaagactataagcttgacctcgtaaacttacattacctttaacggtttgtaatacaggacctgcgtagaaattgaagtttttagttggttgataaccaaatacaaaagataagttttgtgtatcaactttaactttagttccaccagtacctaaataattatttgctgcgttaatagcagcttgggttttttgtagtgctgtcagtcctgcacctacagttgtatttcctccggcagcaacttgttgtaatgcgcctaagatctctgtttgagttggttttgtagggtcaccgccagtaaccttcgtcacctctataagagctggtgtaaatgctgacccagatgcttgaactaacttctgaattgagctgcttgctaagtcacctaatgccttttgacttaaaatagtatcactgcctggattcgaaacgaatacgttattacctgaatattctgcatctgctccaaatggttgatagtagagtagaccgaaagaaaattggtcattaatttgtaattttaatgcagcacttgggaagtagtagtcattcgccatatcgccaatatcacgacgtgtggcactagatccagcttctttaccagctacatcaggatctagaacagaaatacctgcttcaaagtaattaccaggttggaagaacgcagacattgactgtccagagcgatctaaagctgctgcaaaaaccccagttgcaggcagcgttgctaaaatcattgcagtgctcagatgttttaatttcatttttaatctttccttgaacttcaagacatttttttaaaagtaacagagttaaaccgtttaaactgtgttgccttcagtgctttgaattacaagtttcaaagcattgataactccatgtaacaaaaatagcataattacactaagagtaaatctgttctatgaactgcagagtactcactttttatacaaaaaatggcaataatgaatgaaatatgaaggaatatttttgttgtttaattaatttaaataattgatatttatattttttatctattattaaagttacttgtttttatgacatttttgtcataaatccaagaaaaatggtcaaagatttttttgtaaaaatatgaattgattgattatgaaatgagtattagtcatcatttttaatggataagtctagtttctctacacatgtatattattgattcggttttatattgttatttattagataaaaattgagagtattttctttactatttggtcaaattttttgaggaattaattgctggatttaagcttgctttatttaagggataaccgaaatagaaaagaattcggttatcgcgccttttagatttaaaacatagcattagaggggatataacttttcatcaaactcttcaagtttaggaaattttaaaggttcaagttggtcaaggtgagtgagatacgtgacatagtcctcaagaatagtttcacgcgcttcttggctaatgtaaggtacatggtaggcaatgaatgggggaagaacttcaaagccagtataagccaaactaccgcgttgaatcggtgatagataatgttcaattggtccgtgaatagaattttccccaaacatatgtgttctaccaccgagtgttaaacagagcattgcttttttacctgccatgccaccatggttgtaaaaccgcttaccaccataaaaaagtccagagacaaatacacgatcaatccagccttttaaaattgctggaacagaagtccaataaagcggaaagttcaagattactagatcggcacggtttactttgtcaatttctgcttgaatatcagtagccaaaagttgttgttttgtggcatttcgctgttctaatgcatagttaaagtaatcaggttgattgagttctaaaaaatcttccttagaggcaacaggattaaactgcattgcatataaatcggaaatttctacttgatggcccaattttttaaaggtttgctgtgctgtagtttttagggaggttgtaaaagacagaggttctggatgagcatgaacaatcaggatattcatagtgtctttactcttaaagataagattggtttttagtggaatgtcggagagttaagtcagtttgtcttaagtgactatgcctgaatttaaaagcatggcatagttcatgaactgacagtttttaccatttaacgccacaattacgctttctaatgggccgctcatgactccagaattacccggaacttatattaatttattagttgagatcgttaagcgcagaggtatctcttgtgagcagtttttagagggtagtggagtaacaccggaacaattaaaaaaaccgtattggtatgttgagtttaatatcttaaataacttacttgagcatgcgattcaactcactcatgagccagcattagcgggttatttggcattggaaatgaaagcttcttgttatggttctgtcggtatggcggccatggtgtctgcaaatcttgaggaggctttaaaaatacttgaacaatttattggttcgcgttgtgatgcctttaaacctgagttaaagcaagagcaagacgatgtttactggtctattcatcaacctttaaaaagttttcaattaagttcagatgcgactatttttttgttgttaggttttgtttacatcgcaaaacatctaacaggggtatcttctttaggtacagtgcaattgaatatgcccgaaccactaggtttttcaaaaataaaagataaattaggcgtaagttgtttatttgagcaaaaacataatatttggattattccaaaagaatatttaatgcagcctgtactcacggctgatcctatgctggcacctttactgaaagcacagtgtaaaaaagatattgataaattgaagttacgaagtgggtggaaagcagaaattagccaagtaataaaaaaattattgatcaatagtcagggggaaatattaaaagttaagcaagttgcccaaatgatgaatatgtcagaacgtagcctacagcggtatttggcaatagagaatacaagtttctcagcattagttgatttaactcgaaagcaatatgcacaagatcttttgcaaaatagttcaatgtcaattgaagctgtggcattaagtttaggctatgccgatacaccccatttcactcgtgcatttaagcgctggatgggtgtaacaccgaagtattatcaaactcagttaaaactaaaaaatttagagatacgtgaataatcaagaagaccacaaatttgaaagtggtcttctaaccctattttaatttgttaactcttgttttgatgaaagtatatgaattacttcaaaatagctcggtggagtgggcacatgcccacgttctcttaatattttgtgcatacgcggtaatttaaaatatggaacagacgccattaaatggtgttccatgtggtaattgacatgaataggggccacaaagcttctcgcaatccaacctgcacgtgtggtacgagtgttagttaaagcagtattgctggtttgcatacctgcatgttctgccattgaacgaattcttaaaaataatggaaatggagtcaaataagccaaaggccataaccaataaaaacgttgttgaccacatgcttttaaaacaccataaagtaataggttggttgcaatagcgcctgtactgttttttgcaatactctttgcatagtcaacgaaatttttatcactgcggtctaaccagatttgatcattggctacagtccatttcatgacatcaaggtccatcaacacacggcctaagctaaactttaatcctgttataccggttaagtcgcgtaagaatttacgagtaagagattgtttactgacaggaaagcctgcaactaaagaaagatctggatcatccggtgtagatgtttttgcgtgatgtcgaacatggtgtacacgatatttttgtaggtcgttccagattgggcgggcacatagccactccccaacgaaatcatttattttcttatttttgaataaacttttatgggatgcatcgtgcattaaaattgcgaggcataactgacggccagctaaaacagctagagcaagcatacatgctaataatttcccccaactcggtaagtaatcccacatcataattaagctggcaaatgttcctccaataacagcccatgtgctagcaacggcccaagcgccatatgcatctgaaggttctgtaagctcttgtatttcttctctgctaaatagatcggtaacactcacctgtgcattcatttttattctcccaaattagagtttggtatccatattttatattacaaatatagtcataaaaatttaaaaagtgaaatatttgtttgtaaaaaaataaatcagatggctataaatttaattcctgttcatatatttttttccaaagtttttggccaattgcatctagttgctgtacatcttgagcaaattgattacgagcagattcatttacaaatggctctggtaataatgggtcattcatgagtaaggcaattgtttcccttcctaaaagaagtgccttgactgctgcatcgtttaaaggggagtgagcataattttcaagccagtgcgtaatatctcgactatacatttcataatttttttcgagttgtttggtatcccataaagaaaaaatttgcttaagtgttgttgagtcgacatgctgaataatacaaatttttgcttctttctctagccctgctaaaacaagctcatcacaggttttttcaaagctataagctaaattgtctgggcggatgtaaataccagtttccaactctttaaaaccaaattgacgaagtgcacgttcccgtttttttagtgctgttcggtctatgcggcctaaggttcctgtaaacacggcaagataatgctgctgccattctttagtttgtttaattccatttttacgattgagaataactttcgcccaatcttttgcagatggagaaagttgatagattccgcgttctacgctctggatcataccttcatttaacaagcgtgttgtcgcaactcgaataccattttcacttaagttaaaaagtttagctgcaaccaaaatttgtttgatactgagctgaggataagcagaagaaagaaagaggtcgataataagatgacgtgcgttaattttggtatttttcattcagtctgaatttttgatatgagttgtatttaattggaataataacatgtttttttaaggactttttaagatgattttctaaactcatctattgtaaaagacttatctataacaaaagaaaatttggccatttttaaccaagttttatctttttacgatagttaacctaagtttgtcattatgatgtgatacattatcgcactttaaataaactgcctttcactagaggcaataaccacaaatgctagaaatgatctgatattgaacacatgttgagctaaataaaaggctaactgtggcaataaaataaattttagatcgttctagtgattaactaactttctttgagcaagttatggaaaattttgaagttataaaagcactgtttctaggctttgttgaaggcttaactgaatttttacctatttcgagtactggtcatttaattttatttggtcatattatcgatttccattcagatggtggtcgtgtctttgaagtagtgatccagttaggtgctattctggcagtgtgttggttatatcgtcagaaaatcattaacttaatcaaaggtttttttagtggtgatgtcgagtcacgccattttgccattagtgtcttaattgcttttttcccggcagtgattattggcgttttagctgtagattttattaaaagtgttttatttagcccaattgtagttgcgattgctctgattgtcggcgcgcttattattttctgggttgaatctaaacaatttgaacataaaacggatgatgcgaccaagatcacgtttaaacaggcgcttttagttggtctggctcaatgtgttgcgatgattcctggaacctctcgttctggtgcgacaattgtaggcgggatgtttgcaggcttgtctcgtaaagctgcaacagagttttcgtttttccttgcaatgccgaccatgctaggtgcagcaacatttgacctaattaaaaatgctgatgtgttgacttcagacaatatggttaatattggagtgggttttgttgcggcatttattgctgctttattggttgtaaaagcactcgtactcttcgttgagcgtcatacattacgtgtatttgcatggtatcgaattgtattaggtgtaattatcctaattgctgctatgttctttaacttatctgcttaatagtcagattaaggataaaaacctagagaaatctaggtttttttatgcctaaaaatagctttaacttgcttatttatacaaagtactaccaagaaatactttttccttttagtttgattgatatagtaaatcttaaatagcccgtaaaaaataaagcaatgcaacagaatgacttgacgaaaagtttggtagaggcttttttgtatttggctcctcaagaggggttatatcccactcatatttcaaatatcaccctgatgagggtagatcattccacacagccggttgctgtattgcaagagccttccattgttttagtcattcagggtgtaaaacgagcttatatcggaaaagatatttttaagtttcaacaaggccagtgtttatttatctcaattgctattccttttgattgcgatacgttggttgagcgtgaaccaatgcttgcaattgcgattaaatttgaacctcaaatgatggccgagctggcggctaaaatggataaagagcagcgaccacttatagaagattttgataacaaagagataaaactgagctgtggtttaaatattattgaaatgaactcggttatatctgatgttgctttacgcttgttgaacttacttcgttccaagcaagatactgcaatcttaggagagcaggtgaaacgagaacttatttatcgggttttacaagccggtggtggtgattttatccagaacctttcggctattatgagccgaagtggagtgatttatacgatttgtgaaattattcaaagagattattatcgtaacttaacggttcaggagttggctaaacaagcaggaatgagcgtttcgctttttcatcaagcttttaagaaagttaccaactattctccattacagtacatcaaaattactcggttacataaggcccgtgatctaatcctaaataaccaaatgggcgttgcagaagctgcctatgaagtaggatatgtgagtgcctcacagtttagtcgagagtttaagcggctgtttggagttccacctaaattatcaacaaactaaagtaaatcaacacgtcttaaatataaaccaaacatggagcatatcaatgaatcttccgacaaccatgaaaattgttgaaattacggttcctggcggacctgaggttttaaaacttcaagattcaaatgttccggtacctcaagctgatgaagttttaattgaggttaaagccgttggaattaaccgccctgatgtcttacagcgtatggggttatatccaatgcctaaaggggttactcaaatccccggacttgaagtcgctggagtagtggttgctgtgggtgagcaagtgcaacagtttaaagtcggggacaaggtttgtgctttaaccaatggtggcgggtatgcagaatactgtgcggtaactgcaactcaagtattaccaatacctgagaatttatcatttactcaagctgctgcgattccagaaacattctttacggtttgggcaaatctttttgatattggccgtttaaagaaagatgaaactaccctgattcatggcggtgcaagtgggatcggaaccactgctttagcgatttgccatgctttaggtattaaaacttttgctacggttggtagtgaagataaagttgaagcactctctgacttaaccacagcaattaattataaaacccaagattttgagcaggaaattttgaaccatactcaagaacaaggtgttgatgttattttggatattgtgggtggttcttattttcagaaaaacttaaatctattaaaacgtgatggccgacttgtcattattggctttatgggaggtcgaattgcaaaagaatttgatttacaaaaactgattttaaaacgtgccacaattacaggctcaacgatgcgagcgcgtaatagccaagaaaaagcacagattgctcaatctttacatgaacatgtgtggccattattggagcaaggcaagtgtttaccacaaatctataaaacctatgctttttcagatgtacaaagtgctcatgcatgtatggagcagggcgaccatattggaaagatcgttttagagatgaatgcttaatcttatctgtgacagtttaggtgaatgacatgtttgcctaaactgaaattttataattattaattgtgcctatttctatataaaaattgccaaattctattggcttgttgcacctgtttcttgatctgaatatacatttactaagaaataataactgtcttaaagctgttatttcgctcttcaattctaaaggatggtaaccatgaataccccagcatcaaatgataaaaatccaactccagatttagctgaagataatgcgttcttcccatcaccatattcactgagtcaatatacttctcctaaaacagattatgatggcacaacctatccaacgccgtatgcgggcaataaaaaggttttaatgattgcaactgatgaacgttatatccagatgcaaaacggtaagttcttttctaccggaaaccatccagtagaaatgcttttgccaatgttccatttagataatgccggatttgaaattgatgttgcgacactttcagggaaccctgccaagcttgaaatgtgggcaatgccaaagcaagaacaagtagtattagatactttccagaaatatgcagataaattaaaaaatccgttaaaacttgccgatattttagaaaatgtagtcggtgaaaactctccatatgcggctgtatttattccgggtgggcatggggtattagcgaagattccgcatagccttgaagtgaagaaagttcttaaatgggcagttgaacaagacaaatttattattacgttatgtcatggtccagcttcgttactggctgccgcagtagatgaacagcctgagaattatatttttaaagattatcaaatttgtgtattccctgactcgttagataagggagcgaatattgatattggttacatgcctggagcattaccgtggttagtcggtgaaaaccttgaaaaactcggtgtgaagattttgaacactggcattactggtcaatgtcatcgagaccgtaaattgttaacgggcgatagtccgcttgcttctaataatttaggcaaacttgcagctgaaacattgctggctgaagtgaaggattaattaactaaaagtgtgcgccctgcgggactcgaacccacgtcggtcgcttaggaggcaactgctctatccagttaagctaagggcgcataattttctgattataaacaaaaaagccattgccgaggcaatgactttttatagttttaagtacaagctgttagattactgttctttggcattgagtactttaaacaaaataaacatgagaacgatccaaataggaatcatcatcactgattctttaaagccttgactccacataatgtagagtactacagcaataaaacctaaaaccaaatagttactaaacggtgcccaaagtgcaggaaagtgagttttttgaccgagttttttcattgctgatttaaacttaaggtgagtcatactgatcatcgcccagttcaataccagtgctccaacaacaatgtacattaagtggcttaaagcatcttctggtacaaagtaatttaaaagaacacagccaaaaatgagtaatgccgatagcaaaactgctggtacaggtacaccttgtttatttactttcttgaaaatttttggtgcattgccttgttgagctaaaccgtaaagcatacggctatttgcaaacatcccactgttataaacagagagagcggcggttaaaataataaagttcagtaagtgtgcagcccaaccaatacccatttgactaaaaatcataacaaatggacttttgtcgagaccgccaagatctaattggttccacggcactaatgaaagtaagatcgctagtgaaccgatatagaaaatcaagatacggaaaacaacttggttaattgcttttggaatagtttttttcggatcttttgcttctgccgcggccataccaatcagttcaataccaccaaaggcgaacatcaagaaagccaacatatagaagaggccactaaagccatttggaaaaaatccaccatgagaccaaaggttactaaacgaaatgcttgaacctacatctgctgtaaatagcaaataaaggccaaaaacaatcatagagataaccgcagcaactttaataatagcgagccagaattcggactcaccataaaatttgacgtttgttaggttaattgccgtaatcacgacaaagaaaaataagacagaagtccatgctggaatatgaggccaccagtaattaatatatttggctaccgcggtgagttcactcatcgcaaccagaacatagagcatccaataattccatccagctaaaaatccgggaaatttcccccagtatttatacgcaaaatggctgaacgatcctgcaacaggttcttcaacaatcatttctcccaggtggcgcataattaaaaaagcaattaagccaccaatggcatatcctaaaataatggatggtcccgcagattgaatcacttgcgccgagcctaaaaataatccggtaccaattgctccacccatagcaattaattggatatgtcgattttttagtcctcgttgaagtgtagaagattcgttggtcaaaggtcttcactcacaatgaataagtaaattattctaatagatggatttattttagcctagactacaattgaacaagggatgactgtaaagtaactataaaaaatatttaaaatcataaacttgcttttaatcgtgttaaattggttgaaaaatcttccaaaaatatattttttgatagactttttttcttatgattttgctttattcggtcattgcaggcatgaattgaaatttccaaaataaacccgcgtcaatacgattgatgtataaaagtacagtgctatctcttgatcataaaacgatttaagatgaagcgaatgactaaacaagtctgcttgttttgagatataaaaacacaatagtaaggataacagttgatatgagcttcgtaccgcaaattaaaattccagcaacttacatgcgtggtggaaccagtaaaggtgtattctttaaacttgatgatttgccggaaaaagctcaagttgcaggtcaagcaagagatcaactcttgctacgtgtcattggtagcccagacccttatggaaaacaaattgatggaatgggtggagcgacttcgagtaccagtaaaaccgttattctcgccaaaagtacacagccagatcatgatgtcgactatttgtttgggcaggtttcaatagatcaagcttttgtagactggagtggtaactgcggtaatttaacagcagcggttggttcatttgcaatttcaaatggtttggttgatgccgatcgtattcctgaaaatggcctttgtactgttcgaatctggcaaaaaaatattcaaaaaactattattgcgcatgtacctatcatcaatggccaagttcaagaaaccggagactttgaactagatggggtaactttccctgctgctgaagttcaaattgagtttttagaccctgccgatgatggtgaagagggcggtgatatgttcccgacagggaatgttgttgaccaattagatgttccagagattggtagttttcaagccacatttattaatgccggtattccaaccattttcttaaatgcagaagatttaggctacgaaggtactgaattacaagatcatattaatggtgatgcagcagcattagcacgttttgaaaaaattcgtgcctatggtgcagttcagatgggcttaattaaagatatttcagaagcagccgcacgtcagcacacaccaaaaattgcttttgtctctaaaccaaaaaattacacagcttcaagcggtaaaaacgtttcagagaacgatgccgacttactcgttcgagctttgtcgatgggcaaacttcaccatgccatgatgggaacagcagcggtagcaattggtacagcggctgcgattccaggcactttagtaaatttagcagctggtggtggagaacgtgaagcagtacgttttggacatccatctggaacattacgtgttggtgcccaagctgaacttacaaatggccaatgggtggtgaaaaaagccattatgagtcgtagtgcgcgtgtgttaatggaaggttgggtacgcgttccgggtgacagtttctaaaagtcatttaaatgaaaagcctctctaccctagagaggctttttacttctgacatccataactcatcacgcactttttacagtgaatcgtgtatgatgtagcacatgaatgtttcatcacattcaataaaatttctctactgattttacgaggcgactgtgtcatcactctctcaagttaatgcggatgttttaaaacaagctcaacaacgtattcaacaagatttattgacgacactggctgcattctcaattcccgaacctttaaaaagcgctgtacaccatgcagttatgctcggtggaaaacgtgtgcgtccggctttgtgttacgctacagcttctttacaagataatccaaattttgcggctgctcgccgtgctgcggttgctgttgaactcatccattgttattccttagcacatgatgacctgccttgtatggacaatgatttgcttcgccgtggtcagccaacgtgtcatgttgcatttggtgaagataccgcgttacttgcgggtgacattttacaatcaatggcttttgaagttttagggagccgtttgtttgatgagcaagggcagggaacggatgctgcaattgtcttaaagcaaattcaaattttagctacagctagttctaaaatggtttgtggacaggttttagacttacaagcggaagctaaacaaatttctcaagacgaactagagaatattcaccgtaataaaacgggtgcgcttattcaggctgctattatgatgggggcagtgacaattttctcgggtacagatcaggcaattccaaaactacgtcaatatggtcaagcaattggactggcttttcaggtccaagatgatattttggatattacgtcgagcactgaaactttaggcaaaaccgctggtaaagatgaacaagtacaaaaatcgacttatcctgctctaatgggactagagcaagcacagatttatgccaaagaattgcatgatcaagctttcgatgccttagcgcatttcggtgaaaatgcaaaagaattagttgagatttcacaattcctgttagctcgtactaattaataaaaacataaatcaatcttcctacttctattcagacttaatgaatacaggagaaaagaatgaatggtgaacagcttcatcaactcgcaatagaggcggcgcgtaatctcccttttagtgagcaaactcatccatttggtccagagtatgaagtttttaaaattttagaaaaaatgtttatgctgacagtggaagtgtctggcataaaaatgattaatgtcaaatgtgacccttataaaagtcaggaatatcaggaactctatccatttattattcccggctatcacatgaataaaaaacactggatttcgattaaaccgcataaaaatttaacaagcgattttctccgagatttaattggcgactcttatgacttggtcgtaaaaaagcttcctttgaaagatcagaaaagattaaacaaccaataatataaaagaaaaaacggcgacatgattgtcaccgttttatttcaagtaattatttgaagcaattaaattaattatgctttcccataatgccacgaattgtatttaaaacatcggcaggtaacacaacagttttggcattgcttgatttcgccatatcttgcattgctttgacgtattgttcacctaacaggtaagcaacaggaatttctttatcacctacggcacttgttaccatttcaatcgctttttgagaagcttctgctaaaacaacctgcgcttcggcatcacggcgagatgcttctaaacgaccatctgcttctaaaattgcagcttgtttctcaccatcagctttggtaactgtagcacgacgttgacgttcagcagcggcttgagcttccatggccgcttgcatggttgaagatggctgaatatcttgaatttctactgtttttaaagtgataccccaatctgaaatatcatcagaaatcgcagcttttagtttagctttaatgtgatctcgtgaagatagagcatcatctagatccatttcaccgacaattgaacgtagtgaagtctgtacaaggttttgaatggcccatgtatagttttcaataccgtacactgctttttcaggtgtagtcagattgatatacgccacggcattcatgagtaatacagcattgtcacgggtaatgacttcttgtgatggaatatcaagcacaatatctttagtggtgactttataggctacatcatcaatataaggaataacgaagttaagccccggattaagcgtagaatgatattttcctaaacgctgaacaatccatttataaccttgaggaacaatgcgtacccctttaaaaatggtaacagcaacaaaagccaaaaaggctaaaacaataatagtaccaactggcatgaaaataacctctctttatctttaatgtttatgaagtgctgtggggctgaacaattaagtcattacccgaaatatcaatgactcgaacccgatcaccgaccttaacaggggtggtgcttcggcagttccattcatcggcccctaaaataggcatagggaaacgaacaataatttggtcatgagcaagtccggtctgaatcaccataccaatttgcccaatagtcgcttctcgaggtaaacctgctttagttttatcaatagataaaggcttaataaatttaaaccagagaagggtacatagcaccgataacacaatccacagcactatttgagtagtaaggctgatatctggaaataaccaatagagaaagcaaaccattatggctgcaataccaaaccagagagcggcaaaggcagggagaatcagctcagaaagaataagtaagatacccaatacaaaccagtgccaaggttctacaacaaactccatagatctgctcttttatatgtctttatgatgggtaaaagtgatttcatatcacttttaccactgtagcagatgatggagagtgtggatagaaaaaaaccacctcaattaaaatttaggacgtggcgcaggcttaaatgcggctggagattttttgaaatttgcaattgcagtttcaatttggcgaatttgaccttgagcagctttttcgccttctaaaatagcttcattacttgattttaaatcgagtgtacctaagtgcccaactttaggctgaatcaccacgttagcttgctttaactcttcattaatactttgttgacccataatattaatagtttgatcaagcaatccccacatattcgcaggtcggtttcctgccggacgtgcagaaatgtcaactgcaatcacaatatcagcacccatatcacgtgctgttttgaccggaattgggctaaccagtccgccatctacatatttctgcttaccaatggttgctggtacaaatacattgggaatactgcatgatgcacgaacagcttgtcctgcattacctttaataaagtctgctttttgtccattatcaagacgggttgctaccgctgcaaaacgaattgggaatttctcaataggcttgttacctacgttacggttaacatagtcctgtaacttttgcccaagaataataccttggcgattcagggttaaatcgcgaatatcagactcttgcaatttaagcgcaagattttggagttgataaggcgtttgtccactggcatagatactgcctacaaagctaccggcacttgtacccgtaacaattttcggtttaataccatgtgattctaaaaccttgataacaccaatatgtgaaaatccttttgctccaccgccacccaatgcaagtgcaatcactggttcgcgcgctttaactgaagtggtcggtgttggtgttttgctgaacttatcacagccgaatagggctaaagagataaatccgatactggcaaattgagcaattttcatctttgaaaaacaatctatggcaagataaattaagatggcccatcagaccagattcgttcaatttttgctaggtttttttcacaagattttgtaaaggctctgcaagccaattacgatttttcggtgatatttttccttcataacgttcaaaaatcttggcgagatcttcatcataatttccgcttggagttaaatagcctaagcagtgaatagtcttacggtcataatcaaaagaaaacatcacaataggaatattggcttttgcagcaatatggtaaaaaccactcttcattttttttgctttcttacgtgtgccttctggcgccattccaatccagatcttgtcatactgttgaatagtcgcaacgacttgttcagtcagaccattggccgagtcacgttttacaggaataacgcccgcccaatctaaaacccgtttaaaaggtggcttaaataaactgtctttacctagcaccgtaatttgaataccgagtccaaaaatggcaagaaaaccataccagccatcaatattggaggtgtggggagaaataatggctacagctttaggaaagttgggaacttcaccttctatagtccagccttgtgccaaaaagagttttttaaataatgctcgacttaaagcattaccacgttggggaacctgagacggtagattagggaaatgttgttccatatttttaagttttaaatcatcctttgttttatcttaatcttttgaaatctgcgcttcattggcaaaatgtaagaccacgcatggtatttcatgttattaccgcacaaataaataaaagtaggtatatatgttccgacagcaaaatctttatcttttgctcttttccttatattgggcacaaggtttgcctgtaggttttatgacgcatgccttacctgtcatattaagagctcaaggtgtatctcttgcccatattggtggttttgggctgctcatgttgccttggtcaatcaaaatattttgggcgccgtgggtagatcgacatgccatctcgcatttaggtcactatcgtagctggattttacccgctcagtttttgacggtgggtgtactttgtattttatcttttttccctatacaagttttagatcagcctctttatctctttatattttttattacgctgttatttatgaacttaacaggcgcaactcaagatatcgcgaccgatgctttagcggtcaatttattgcaacacgatcagcaacattggggaaatacttttcaagttgtaggttcacgacttggttttattgtaggcgggggagccgtgttatggtgcctagactggttatcatggcagccgacttttctattattagccgctttagtctttattaataccttacctattttactatttaaagagccatctcatacttctcattcacctcatcaatatagccaaccacgtctagttacaaagattaaagcttacttggggtacttctctcaaaataaggaacttcgttcttggttaatcgtccttataacttttaaggttgcagatggtttagccgggccattacttaaacctttaatggtagatatgggtttaagttttactcagattggtatttacatcaccatgcttggggctgttgctgctttattgggggcacttattgctggctggatgttaaaacatatttctaggtccacagcattaatgactttttcgatattaaaaattatgagtttagggagctatgcgtatttggcttatgcttatgaacaaaagataaaaataaatgcatggcttatctatgccgtaaatgccctggaagatgcttttgctgccatgctactggttgtgatgttaactttggttatgcattatagtcgaaaaaactatgcgggtaccgattttacttttcaggtttcagtcatggcgacagtcagtggtggtctttatagctttagtggagtcattgcagatgcgcttggttatttccattatttgatagctattgtcagtattgcggtactctttttaattcctatttacttatggaaagctgccaaaactgtataaaaaataacattaagtagatgaaataaagagacttaaatataaataagctgcactaaaaaatcatacttatatttttagccaatcttttaaaaatgtatatttttggctatttaaatggcttattaattgtgccatcttgtttggaaagcaaaaggaagctgcaaggagagaagtggatgcaaataacaagaaaaatcatgtgaatcaaataagactggcaaaaaaatattcatttagattggatattagcctaaagtctaaaaaagaataatgaaataatgatttaatcattctataagataagagagttgtgtaggattcgttacaacatgaagttaaggtaaaggttctgtaaaccaaaaagtaaatgctgattcttttggaccggaatttttaatcttacccagcgttaaaattggttttgattgcggtaataaaattaatgcaatcaaatttggaggatggttgattctttagtgcttaatggtcacacgaatcaacttggcatggacaggcagcataaaatatatttttaggagtctttgatggatctattccttaatcgtaaatcgtttgttgttaaaagtttagctattacagtaacagctttaatgatgagtggggcaaatgcggcaacttctgataaagaggaaattcgaaagcttcgtcaagaagttgaagcattaaaagcattagttcaagaacaacgtcaagtacagcaacaacagcaacaagtacagcagcaacagcaagtacagttagctgaagtaaaagcacaacctcaacctgtggcagcaccagtgtctccattagcaggatttaaatctaaagctggcgctgatgtgaacctttatggttttgttcgtggcgatgctaactatattattgaaggtgcagataacgactttggtgatgtaagtaagtcagacggtaaaacacatgataaattacgtgcgactgctaaaacaacacgcctcggtttagattttaatacacctgttggagacgacaaagttggtggtaaaatcgaagtcgattttgctggttcaaccacagattcaaatggctcattgcgtattcgccatgcttatttaacctataacaactggttgtttggtcaaacaacttcaaacttcttggctaaccatgcaccagaaatgatcgacttctcgacaaacattggtggtggtactaaacgtgtacctcaagtacgctataactacaaactaggcccaactacacaattatttgtttctgctgaaaaaggtgatagtactacttcggtaacaggtgatagtattaagtatagcctaccagcattaactgctaaaatcactcaaggctatgcagaaggcagaggttctgcttcagctcgtgttctggtagaaaattataaatcacaacttgctgatgatgataaaactggttggggcgttgcagttggtactgactttaaagtgtctgatcctttaaaactctttgctgacgcatcatatgttgtgggtgataatagttacttgtatggtagtaactctccatacgcagtagatgggaattctattgagcaaaatgaatttgtagcagtacaagtgggtggaacttataagattttacctaacttacgttctactttagcgtatggtgctcagttctctgatgatggcactgattatgcgagattaaatgcctctgcaaatgaaaaagttcaacaagcatggatcaactttatctatacgccagttaaaccaattgatttaggcgttgagtatgtaaacggtaagcgtgatacctttgatggtaagtcttacaaagataaccgtgttggtttaatggctaaatatagtttctaataacgatttttttagctaaaaatagaaaagacgaggttaaacttaacctcgtctttttttatttgttaaatttaaaaaataataatgaaataaagtctctaaattagatcattttttatttaagtcatttttaagtttcaatttctacattaaagcatcataaaaagattgtagtcactcacgatgctgaattttttttcaacattaagaaataaacagatttccctgtttatgtttaatctcattatagccatttggctaggtgcaattttaaatattggtttttatcatcaagtccatactttaactccatattttggagtaaaggctattttgtttttagctgctactctcataattcttgttgctacctattatgcggttttacaaatcttaaattggaaatggactgccaaaatctttgcaattttattgatatttattggtggttttagctcttattttgtaaacacattaggtgtcattatttcacccgaccaaattcaaaatatggtgcagaccgatgtttcggaagttaccgatctaatctctttacgctttgttttatggacaattttttttgttattttacccatttttttaattactcaagttaaatttaaacaagaaaaagtatcacggttgttattgaagaaagtattctcactggtagcttcattggccgtggtcggtgttttactttttacctactatgtcgattttgctgcaatatttcgtgagcatcgtgatttaaaagggatgatttcaccgcaaaatagtatttcatcgcttatgtcttactaccataagaaggctccgaagaaaaatctgcctcttgtgatatatggacaagatgctcatcaagttcagcgcgtacaaaagaatctccctaagttaatgatacttgttgtgggtgaaacggcacgtgccgaaagtttctctctaaatgggtatgcaaaaaatacgaatccggagctttctaaacaagatattttcaacttctctcaagtgagctcatgcggtacggcaacagcggtttctgtgccatgtatgttctcgggtatgccacgtgtagattatgatgagcaattagccagtcaccgcgaaggtttactagatattgcaaaacgtgcgggttaccaagtaacttggattgataataactcgggttgtaaaggtgcatgtgatcgcgttgagcaataccagattccagaaaacttaaagaaaaaatggtgtaaagatggcgaatgttatgatgacattctcattgacagcttaaagcagtatttgtctactattgccaaagatgatgatcgtccacgtttgattgttttgcatcaggtgggtagtcatggacctgcatattacaagcgtgcgcctgaagcatatcaaccctttaaaccgacttgtgatacgaatgcgatacagggctgttcgcaaaccgaattgctaaatagttatgataatacaatcgtatatacagaccatgtattaagccaaatgattaatactctaaaagaaatatcaaaatatcagacaggtttatggtatttatctgatcatggcgaatcaaccggagaacatggtttatatttacatggttcaccttatgcaatcgcaccgagccaacaaacacatgtaccaatgattatgtggttctctgaaagttggaaacaacataatcttgctcaagtgaattgtttaagccaacaaactaaacaaaagttaagtcaggataatttattcccaagtttgttaagtttgctggatgtaacaactcaggtcatcaaccctcaactggacatgttgcactcttgtgcccatgtaaactaaagcgagcctagaacatgacaaaaatcttgatgattgaagatgattttatgattgcagaatcaacgatcacgttgctgcaatatcatcaatttgaggtggaatgggtcaataacggtttagatggtttggctcagttggcgaagactaaatttgatcttattcttttggatttaggattgcctatgatggatggtatgcaagttttaaagcagatccgtcaaagagcagcaacaccagtattaattatttctgctcgagatcaattacaaaaccgtgtcgatggtttaaatttgggtgcagatgattatttaattaaaccttatgagtttgatgagttgcttgcccgtattcatgcattactacgccgtagtggagtagaagctcaacttgcgagtcaagatcaactattagaaagtggtgatctggttttaaatgttgaacagcatattgcgacgtttaaaggccaacgcattgatttatcaaatcgtgaatgggcaatcttaattccacttatgactcacccaaataaaatcttttctaaagccaacttagaagataagttatatgattttgatagtgatgtgaccagtaatactattgaagtatatgttcaccatttaagagcgaagctgggtaaagattttattcgaaccatccgaggactgggctaccgtttggggcaatcataatttaaaatttcgggacttcataaaagtgcattattcattaaaaaaacgactgatttggggcacctcaattttcagtgtcatcttaggttgtattttaatttttagtgcttataaggttgcacttcaagaagtcgatgaaattctagatactcaaatgaagtatttagcggaaagaacagctgagcaccctttaaaaactgtaagcagtaagtttgattttcataaaacttaccacgaagaagatctgtttatcgatatctgggcttataaggatcaggcccatttgtctcatcatttacatttgctggttccacctgttgagcaagcgggattttattctcataaaaccgctcaaggtatagtcagaacttatgttttacctttgaaggattatcagattcaggtcagtcagcaagagagggttcgtgaagctttcgcttgggagcttgcgggcagtatgtttattccgtatttaattattttaccttttgcaatatttgccttagcagccattattcgtcgtggtttaaaaccaatagatgattttaaaaatgagttaaaagaacgcgattccgaagaactcacaccaattgaagtacatgattatcctcaagagcttttacctactattgacgaaatgaaccgtctttttgagcgcatttctaaagcgcaaaatgaacagaagcaatttattgccgatgctgctcatgaattacgaacacctgtgactgcattgaacttacaaaccaagattttgctaagccagtttcctgagcatgaatcattgcaaaacttaagcaagggtttggcgcgtattcagcatttggtgactcagcttttagcattggcaaagcaagatgtaactttaagtatggtcgagcctactggttattttcaactcaatgatgtggcattaaattgtgtggagcagttggtcaacttggctatgcaaaaagaaatcgatttaggttttgttagaaatgaacccatcgaaatgcatagtattgaacctactgtacattcgattatttttaatttaattgataatgcaattaagtacaccccgcatcagggtgttattaatatttcagtttataccgatccagatcactacgcatgtattcaaattgaagatagcggtgcaggaatagaccctgaaaattacgataaagtccttaagcgtttttatcgcgtgcatcaccatcttgaggtgggaagtggtctaggtttatctattgtagatcgtgcaactcaaaggcttggtgggactttaactctcgataagagcttagagcttggcggtctttctgtattagtgaaattacctaaagttttacatttacatgaaacaagagtgtgattacgtaagttcttgtttcacttgtttttcaaactcaaaacgatgaatacaaatcgcataaaataaaatatttattgcccaaacgacccagcctgtccataagttatggcttagaaaatgtgctcctcgcatcatttgcgcccaacccatcatgaaacctaataaaataccggagaataaataaaagtaagcacgtttaggttgttcaagacgataaacaaaataacctgtcattaaaataaaacctgcacttgcatgaccgcctggaaaacaatggccatgtttagcgctaaagtcccaaatatagcttcctaaagtattagggtgaaccatattccaagggcaggcgtgagcagattgtgactttattaggccaactatactgctaccgagcatactgacaaaaaacatatagccatattgccagcgataaggttttaattttttaatttaaatgacgcaagccataaaccaaaaaagataacataaacggcggtgatgatttgttttacaatttcatgattaagtctttcaagataccaattgtcccgattgaaaaaatgacctgttgaatcaatccaaggttggatgaggtacatatcaattttcccaccgactggaaatacaaatagaagaataaaaaaactgaaaaaaagaaagagaatattaatttggaaaaaaagtttttgattagtcattctgatgcaatatcaatcgacaataggtgcgactaattacataaaattaatcttaaattgctcttaaactatactggtgaaagaagttcaattttccttaaaaaataaaaaagcgacgaatagtatcgtcgccttaagcactttagaaagtattaaaacataccttcttcagagtttgctgagatcttatgaatagataagtctgcaccacggaactcatcttcttgagataggcgaatgccaatggtcgctttaaggatgccataaacaatgaaaccgccagccagtgcaatggcaatcgcgagtgctgtaccgatgagctgagagatgaatgatacgccgcctaaaccacctagccatttttgaccaaaaatacctacggcaataccaccaaatgcaccgcatacaccatgtagcggccagacaccaagaacgtcatcaactttgagtttgttttgggtataggtgaatagatacacgaacatagcacctgctgcaccaccaattacaagtgcactgactggatgcacaatgtcagaacctgcgcaaatagcgactaaacccgcaagtggaccgttgtgtaagaaaccagggtcatttttcccaatcgcatttgctgtaatcgttccgcctaccattgccataagggagttaatcgcaacgagaccagagattgcatcaacacgctgagcactcatcacattaaagccaaaccagcctacgatcaaaatccatgaaccaagcgccaaaaatggaatagaagaaggtgggtgagcacttacacgaccatctttcttataacggccagaacgtgcgcccaataaaatgacagcagcaagtgctatccaaccgcccatggcatgaactacgactgaacccgcaaagtcatgaaaagctgcgccaaaagttgtttctaaccacttttgcagaccgtagttgccattccagaccattccctcgaagaacggataaaccagtgcaaccaatgcgagtgtggcaatcgcttgtgaacgcatttttgcgcgttctgcaataccgccagaaatgatggcaggaatggccgcagcaaaagtgagtaaaaagaagcaacgcataaggttatagccatgatcattggataaaaccgtaccatcatggaagaagtgctggccataagagatgtagtaaccaacaaagaaatatgcgattgcggagagggcaaagtcagtcagaattttactaagcgcgttcacctgatttttgtggcgaactgtaccaagttccaagaatgcaaaacctgcgtgcatggcaagaaccaaaactgcaccaagtaataagaaaaacagatctacattttgcatagcatgctcgaaaaaagtgctaaattccattttggaacaaatctgggtctgtaaattgcaccaaaatagatttaaggaatctaaaaacctaagtttgtcgaaacaaactcaattgcataaaagtgaatatgcaataagcgcaccaatttggattgaaatagaggattttggcgataaatggtgcgttgatttattcaagatagggcaataagggcgctttttacgttacaagtcatctaatatgttgataaattgatctgaaagagatcattattaaatttttaaaaattatctatatttaattaatgatcagaccaaacctcttgagcaacttcaataaatgcttttacggctggactgatgtgttttttgttttttactgcaagaccaatagaacgtttaaggtttggtttaaaagggcgtttaactacgtttggataaagcgagagtagctctttggtgatcaccatatcagagacaatcgaaatccctaactggttgtgaaccatactgacaatactcaaaatttgtgaaacataaaatttgatgtctggtttgacattaaaattttttaaaattaattcgacctgatgtcgactacccgccattgtcataatgaaaggacaattttctaactgtgctggatcaatatagagttgttgggcgagcgggtaaccactcggaattaaggcaacaaaacgatcttcaattaagggaaatgtatcaaaacgctcatctggcataatcaaaaaaccaacttcgatgcgtcgctctaataaccactgagcaacttctttatcttcaccttcatcaatataaatttcgattttggggtagcattgccgaaaggcttctaaaatttcaggcaatagataaatagaggatgaagccccaaaagatccaatacgtagtgtgccttcgtttaaaccatggattgcagccacttctttttctaaggtatcggaaatactcaatagctcttttacatgggttaataactgctgacctgtcgtcgtcagctcaatatcgctttgagttcttgaaatcaggttaatgccccattgttgttctaatgatttaagcgcatgggaaactgccgactgtgaaattcccagcttttctgctgtagcagtaaagctttttagttcagcaatgagtgcgaaaatttcaagctgggtaaatgtcatgttgtacttattatgagtaaaaactcattttatcatgagttttcattatctttaatatatgagtaagccaagttagttcccaaactagcaagcctcaacaaaactcgagtaaagaaatgaatagtattgttttatctctttttcctttagttgcattaattgcatcgggatacttatttaaaaaatatcgtttttttagcgatgagttttgggctggggcagagaagctgaattattatattttatttccagctttgctttttagtacgctatcgaccgcaaaaattgacttacaaagcttgagtacagccatcattgcgatgttggttgtggttttagcagtgaccgcttttttatacatacttcgaatgttttggcacataccacccgcacgttttggtgtgcatgtacaaagtatggttcgctttaatacctatattggtttggctttagtcacttcgctttttaaaagtgaaggaatggcaattctggcaattttattggcgctttgcattccgcttgtgaatgttatttcggtgcttgctctaacctctaaagaacatatggcaattaaacctgttttgattgcactccttaaaaacccgttgattgcatcatgtgtgattggagccgtagtcaatgcgcttcatattcctatttgggaaggctttactcagtttattaagcttttttcagtgtcgagtttgccactagggttgttatgtgttggcgcagctttacagtttatgcaaattaaaaaagacattgtggtattggcagcagacacgtttgcacgacttttagcagttcctgctttggcttatatggtctgcatgtggtttgatttaccaagtttgcaaacgcaaattttagttattttctttgcgctaccgactgcttctgcttcatacattttaaccaaagttttgggtggagatagtcagcttatggcagccgtgattagctttcaaactttatgcaccgccgtgactttaccactggtgatttggtggatttcttaagatataaattttaggctttttaacacttaaagaatgctggctaccttcctcatataattattgctacacttttttctttttcgggtggatgagtatgtcctttgatctcaaagtgagcttgcagcaaaggtctgaaccatctgcacagcagaaaaaactgaatcgcctgattgataaaatagaacagcaaaaagttagtctgagcacatggcaaaatgcacaagctgagattcaacagtacatacgacaaaaactgatgcctgtatataatgatttacatacagtgctatttcagcagttagagcaactttggaatatattacatagccatgagttttccaaagcagacatacaacaactggatgaaaaaattgcccagcttgcacaaatgttgaagcgctcaaaaatgttatctgctgaacaggtggatttagtgaagcagatcgataacttttatcagcaacatgcagcggaatcggcaaaaaagaatagaaaagctcagtcaataaaatctgaatatgaagaaagcgttgatcaaggtttagagttagaagaagactttgaacggtatgcggctgagcaacaacaagcgcggaaacaagctaaacagcaaagacagcaacaaaaacgtgaacaagctgagcaaatggcagcccagtcactcaaaacagtttatttaaaaattgccgcgatgattcacccagaccgtgagcaagatgaaactaaaaaagaagaaaaaactgagttgttccaacaagcaagtcaggcctatgaaaaacaggacttgttttacttactcaaactccagttacagcttgaacagaataaagggctaggcgctaaagagttatctgctgagcagttgcggttttataaactggctttggatgcacaaagtcagcagcttgaaagtcaaattgctgagattttagattcttttcagttagccaagaatgtgaaagtagagcatgtacatattagtgatgtgtataaagctgtagatgctgattgtgctgagctaaagcagcagttgaagtgggaaaaggaacgtttaaagcatatgaaaaaggtaagtggggtggagatgttattggggcatggggtgctttaatcagtttctaggttttatgtgcagccatgagactaccgatgatttgataaggtataaattctgaaataggaaatcgttgagattggattttttataaaatatagtgtggaaattataaaaattaaaagatcggatttatgaatgaaaaacttattcaattatcaaaagaacttaaacatagacctattttagagaaggctttaggttattttcctaacttacctttagttgctatcgattgtggctgtggcgctggcaatgaatctgcttatctactctcaaagggatttaatgttcatgcttttgatatttcaattgatgcgcaaaaagtctgtactgatagatttaaagatgactctaaatttattttctatcatgaatcttttgaagactttaatttcccgtcttcaagcttaattattgcttcatcaagtctgttcttttgtaacccaagttatttttatagcgtaattaaacgaatgataaatgctctttctgaaggtggaattcttgtagttgatttattgggaatttatgatgagtgggttattagagaacctacaaaatttataggatttacttatcaagatatagctgatttattcttatgtgattttaatctgctgtttcataaagaaattaatgaaaatttacctttattggaaggttatataaaaacatggcatcttcatatgctgattctacagaaaagtgatttttaaatatagaaaacccagaacctgcttgcacagattctgggttcatttaactaattaaattaaagcgcagcaatttgctccatattcgctttaactttatctaactgcgcagcaaactcagcaagcttcgctttttcaccttcaacaaccgctgctggtgctttagatacaaagccttcatttgcaagtttatttgcaatttggtcgtgttgcttttggattttatccaagtctttttgcaaacggccaagctcagctttagggtcaattaagcctttcattggtacaaataccgatgcatgacctacaacacttgaagaagaaagcggtggttcttgatctttacctaagaactcaatactttcaactttagccaatgctttgaacaacgcttcaatacgagtaatttgctcacgttcagcattagaaatgttttgaagtaatactggtaataaacgcgcattacctaagcccatttcaccgcgaatgttacgtaccgcaccaatcaaaccttgaagccattgcatatctgcttcagcttgttcattgatttttgcttgctcaggaataggatattgagcagtcataatggttgggccgccttgaccaagcattggtgcaagtgtttgccagatttcttctgtcaaatatggcattaatggatgagccaaacgtaatgatgcttccatgacagcaagcaatacacggcgtacttcagctttacgttcttctgaaacttctgcatcgttcagaactggtttagttaactcaacgtaccagtcgcagtattcattccagataaagtcataaatcgcttgagcagcaaggtctaaacggtaagttgcaaacgcttggtgtacagcagcttcagctttttgcagacggctgataatccattgttctggaagttcccaaagatcaggacgtgcttcttgaccgacagtttggccttcaacattcatcagaacgaaacgtgttgcattccagattttgttacagaagttacggtaaccttcaacacgttttaagtcgaacttgatgtcacgaccagtgtttgcaagggcacagaacgtgaaacgaactgcgtcagtaccataagcattaatgccttctgggaattctttacgcgttgatttttcaatcttcgcagcatctttcgggttcattaggccagtcgtacgttttgcgactaagctttctaaatcgataccgtcaatcaagtctaatgggtcaagaacgttacctttagacttcgacattttttgaccttcaccatcacgtaccaagccgtgaacgtaaaccgtcttaaatggaatttgagatgaaccatcttcatttttcatgaagtgcatggtcatcatgatcatgcgggcaacccagaagaagataatgtcaaaaccagtcaccaacacgtcagtcgggtggaaagttttgagttcaggcgtttgttctggccagcctaaagttgagaatgtccaaagtgcagatgagaaccatgtatcaagtacgtcttcgtcttgtttaagctcaacatcggccgcgatgttatttttcgcgcgaacttcttcttcgctacggccaacatagatgttgccatcagcatcgtaccaagctggaatacggtgaccccaccaaagctgacgtgaaatacaccagtcttgaatgtcacgcatccatgccatgtacatattgctgtactgctctggaacaaacttaatacgaccatcttgaaccgcttcaattgcaggctctgcaagaggcgcaatttttacgtaccattggtcagtcagtaacggctcaataatcacaccagaacggtcaccgcgtggcgcttttaagtcatacggttggatttggtctaaccagccttcagcttccgcttgagcaactaattttttacgtgcttcgaagcgctctaaaccagcatagtctgcaggtgcagtaatggttttagaaatttgttcaccagctttggcaatatattcaaattcacctaaaacttcggcatttttgttgaagatattgataattggcaagctattgcgtttacctaactcatagtcgttaaagtcatgagcaggggtgatttttacacaaccagtaccgaagtctttttcaacgtaatcgtcagcaacgattggaattaaacgaccagtaattggcaatacaatatttttaccaacaaggtgtgcataacgctcatcttcagggtgaacagcaacagcagtatcaccaagtaaagtttcaggacgagtcgttgcaactacgagatagtctttgccatcttgagttttaactgatttatcttcaaagaaatatttaaagtgccaaagtgagcctttttcttctttgctttctacttcaaggtcagaaagagcagtttgaagtttagggtcccagtttacaagacgcttaccacggtaaattaaaccgtcttcgtgcaaacgaacgaaaacttctttcactgcgtttgataaaccttcatccatcgtgaagcgttcacgtgaccagtctacagacgaacctaagcgacgaatttgtttggtaattgtgccgccagattgttctttccattcccaaactttttcgatgaacttttcacggcctaagtcgtgacgagtaataccttgtaagccaagttgacgctcaacaaccatttgagttgcaataccagcatggtcggtacccggttgccacaaagtgtttttacccatcatacggttataacgggtgagggcatccataatggcattgttaaagccatggcccatgtgcaaactaccagtgacgtttggtggtggaatcatgatacagaatgattcaccgtgaccagaaggtttgaagtaaccttgttcttcccacgttttgtaccacttcttttcgatctcggttggatcgtaggtggtggcaatattttgagcggtttgagcgtcagtcatagtagcttagatcgaatatgcataaaaaattgcatctattgtagcaaaaaattgcctcgaaattaatgtgctgaaaacagataaacggttttgtatttttttcaaaaaacggtagatttatgaagcatggatcacaatttaatcgtgtagaggcacggaagaaaaattacaaaagaattgaaaagggatgcgacacatgagctacaaagtttttttaaagatttccgattcaacctatacccagtttgcttcaattcgagagaaattacatgctggggtaagagaaagccagtcgaaagtattgggggatgttctttccgatttgtcgtgtgaaattattgagcaagttttctctgtattgttaaaggatgagcaagataactcgactatgactgaaaaacagcggtatgagtccgagaaagttcttcagcaaattttagatactttccgaaaatatatgccttggtcagtctcttttttcggtaatgaaagacttttacctttagttgattatatgacctcactcatgaaagaacgtgagcaagaggtttatattacatacccgatcacccctcaacttgtgcaacaggcccaaacactgacggaacaaatacgtgagggcaatatgcaaagcgtagaaaaagcttttcagaccttaattcaaattgtggatttaggtgtaacaagcctagtacgtgaacctaaaaaacgtttaaaatttaatttggttgtcgataaaaccctaaatggggtcattaatatgacaacgcatttgggctataaacgtttggaaaaattggggatgcaggttgatcaaacgaccgcaactcattatatcaaccactttttggcctttatgcatcaagcagcataacttaaaaagataataggaagttaaaatggccaaacttgatactttgcaaaataaagtggtgtggattacgggagcatcttccggtttaggtaaagctttagctggtgagtttgctttgcaaggggttcaagtgattttaacttcgcgtcgctttgaagagttagaagaagttcgcgttggtttactccatccggatcagcacttgtcggtagttgcagacattaccaaccaacagcaagttcaagaagcgtatgagcagattttaaaagccaaaggtcgaatcgactggcttattaataatgcgggtttaagtcaacgtgctttgattcaggacaccacgatggagactgaaagagccattatggaagtcgattatttctcgcaagtggcattaaccaaaactgtgctgccgaccatgcttaaacaaaagtctggccgagttgtatttgtgtcgagtgtagcagggctattaggtacgcagtatcgtgcaagttattcggctgctaaagctgcaattcacatgtgggccaacagtttacgtgctgaagtttcagatcagggcgttgaagtttctgtgattttcccgggctttgtaaaaactaatgtttcatttaatgcgctaaatggtgcagggcaacctcaaggccaccaagatgaagcaatcgaaaatggactagaggccgatgtttttgcagaacagtcagttaaggctttaatgcaaggacaggaatatattgtagtgggcggtactaaagaaaaattaggcgtgatggtttcccgtatgtcaccgaaactactctataaaatgatccggaaaacaaaagtgaaataaaaaaaagatttcgccgtgctaaattgatggaaaaacccgcatagaaggttcaccatggatcaagactaccatcgtattttagaggtcattacgcgttttcaattggtttttgaccagaaaaattgggatgcgtttgatgagttgttggccgatcaacttgaggtggactatttgcagtttagaggggagcctttatgtgtggtgtcttgtcatgaatttaaaggttctcggcaacaagctttgtcgcatttacgactacagcacaatttgagtaatcctcttattcggattgaacaagaccgagcatggctagagtgtaattatcaaatttaccgtttttcggaaaatgattattttcattcttttggtcgctattattttactttggcaaaacaacaggataaatggaaaattaccggaatttgccaacacttaactaaaaatattggcaatccgcgtattcacttttctgctatggggcagtgctagtctttgactgctgtaccataagcaaaaacctcaaccattccgccttgcataccgagttcggttgtactcagccgaactcccataatatggttcgcacctacactatgtgcttgttgttttagtcgtacaatcgcctcgcggcgagcacgctcaacaatactttcataactgctaagacgaccacctaaaacgttttttatagaagccagtacatatttaaaatagtcatgcgaaataaccacattactgctaataaaatgacccaactggtcgcttgtggcaaaacgattggtatcaattctgatatgggcaaattgttgctctttttctagaagctcatttaaatgttttcgttcaatatggcggccaaaagcccaaccaatactgaaaagaatgagaaaaataacaagctgaaaaataagattgtccattttctacctatgcactaaatggatcgggtagatgaggtgctggctgcacaactactgctgtgccatatacaaataattcagaagcaccttgggcaatatttgaggtagaaaaacgaataccaacaattgcattggcaccaagttgctgggcttttacaatcatacgttgcatagcctcttgtcgagattcttctaataattcggtataacccgtaagttcaccacctacaatattttttaaacttgccatcaagtcgcgacccacatgcttactacggacggtactcccgtaaacgacatcaagctgctttaaaatttgatggcctggaacactttctaaattacttaataacattgttttttatcaaactaaatttcttaagctttcaagataaaaaatattcagatgagttgcaataaaaaagcccaccaaagtgagcttttataagaaagtgatttaaaacttattgctttttaagttcagcactagatggttggtgaaccactgtatctgaagtatttgcttttaaaccaccacctagagttttgtataactcgatttggttgtttaagtttgcttgttgaagcaataacaaaccttgttcagctgcatatgaagaacgctgtgcatcaagaacagtcaagtaactatcaataccggcacggaagcgggcatttgaaagtgtgtagttgcggttagttgcttctactagacgttgttgtgctgttaaacgctcaccaatattggcacgagttgcaagcgcgtcattaacttcacggaacgccgactgaactgatttttcataatcagacaatgcaattttctgatcggtttcagaaatttttacattggcacggcgtgtaccccagtcaaagattggtaaatctaagcttggaccaactgaccatacaaaaccaccagacttaaatagatcacttaagtcagttgatgcataaccagccgaacccgttaagctaatggttgggaataaacgtgcttttgcagcaccgatattcgcacccgcagcgcttaagttgtattcagcagcttttacatccggacggttatttaacaagtcacttggtaaaccggcagtaaacacattttgttgagcaatgcgttttacaggttgtgtaggtaacaagttttgtggaacaggttggcctacaagcaagttcaacaagttttgtgcttgagcaatttgagttttgtagttcgctacatcattacgcgcagtttctacagaaatctgtgcttgacgtaatggaacttcactgtcaatacctacatcaaaacgttttttgttgagattgtaagaatctaactgtgctttaagcgtttgctctgccagtcttaagtttgctgttgcaaacgaataatttaaccatgcttgagcaacttggctaatcagactgatttgagtcgaatcacgagcactttgtgttgcaagataactatctaaagcagcatctttgaggctacgaacacgaccccagaaatctagctcataagcagttacacccaaacctacttgataagtagagtaggggttattcggatcacggctttgagaaacctgacgaattgcactaccacttgctccgattgttggaagctggttgttctgtgtaatctgatattgctgttgagcacgttcaatattgagcgttgctgtacgtaagtcacggttattggcaagagccaaatcaatcacttcaagcaaacgcgggtcagcaaagaactgtttataaccctgttcagcaatagacgtaccagaagcgctgttatatgcatagctttgtggtatatcggttttcacgactggttctgggccgcgcatgctttgacaagctgccaaagcaagcgcaagtgcagacaccgcaatgctacgacctgaaatagaccatactttttgcatcacgatttatgctcctgagtgtttatggtttttggtttgtacttaaagatactacgaatccacacatagaatacagggataaagaagattcctaagaacgtcgcgctgagtacgccaccaagtacaccaaagcctacagagtgctgacttcctgcaccggcacctgttgaaagtgcaagtggaagtacaccgaaaccgaaggcaagggtggtcatgataattggacgtaaacgcatttttgcagcatgtaaggttgcatcaagtagatcttcacctttttcctgcaattcttttgcgaattcaacaatcaagatcgcattttttgcagaaagaccgataaccgcaataatcgctacctggaagtaaatgttatttgagagatttggatctcctttaataatcatgcccaagtaggtcaatacgattgcaccaatgacaccaagtggtaccacaagtaaaaccgagaacggaattgaccagctttcatatagtgcagccaagcaaaggaatacgattaacaatgaaagtgcgtataagaacggcgcttgagcaccagactcacgttcttcaagtgataagcctgtccactcatagtcgaaaccttgtaagcccatagatggtaacttaccaataatttcttccattgctttcatggcatcaccagagctcacgccaggtgcaggtgtaccttgaatgttaaccgatgacacgccgttataacgttcgagacgtggagaaccatacgtccattcgcctgtagcaaatgccgagaatggaaccatctcacctttgttattacgtacataccatttgtttaagtcttcaggcatcatacggctgcccgcatcaccttgaacataaacttttttcacacgaccacggtcaacgaaatcgttaatgtatgagccaccccatgcaatacgcattgtattgttgatttcggcaatactaacgcccatagcaccagcttgagcctgatctacattaatttgatactgaggagtatcttcctgaccatttggacgcacacctacaagacgtttatcttgtgatgccaaacctaaaatcgtgttacgagctgcaatcagtttctcatggccttgaccacttgaatctttaagctgcaagttaaatccggcagttacaccaagttcaggcattgctggaagctgtaacggcataacgtatgatgcatctttaatgatcatatttaatgccataccacgctgaatcaatgaaccaatttgagtttctggtgtcgtacgtttgctccagtctttcaacttaacgaagccaatacccgcgttttgaccaacacctgtgaatgagaaaccagaaacagtgaaaatagattccacggtatctttttcattcataaagaagttagtcatggtatcaatcactttaccggtacggtcaagcgttgcatttggtggtaattgtacaagtgtcatgaccacaccctgatcttcttctggtaagaatgaagacgggagtttttggaacaagaagactaaaagggcaactacaacagcatagagcacgccagagaagattttgcctttaagcatgcggctaacaccattttggtagctatgcgacatgcggtcaaaaccattgttaaagcttctaaagaaacgcgcaaagatattattgcttggttctttattaggatcatgctgtttcaagatagttgcacaaagtgccggtgtgaacgtcaacgctacaattaacgacagaaccattgcagttacaagggtaatcgagaactggcggtaaattacacctgttgtaccaccaaagaaagccattggtacgaataccgctgtcaatacgctggtaatacctactaacgcaccagaaatctgctgcattgagcgagaagtggccgtaaccggatcggtatggtcttcactcatcacacgttcaacgttttcgactacaacaatggcgtcgtcgaccagaagaccgattgccaataccatagcgaacatggttaaggtgttaattgagaagccaaagatattaatgaccgcaaatgtacctaatacaactactggaactgcaagcgttggaataatcgttgcacgccagttttgtaagaataggaacatgacaatgaataccaaaatcacggcttcaattaatgtgtgtactacactttcaattgaaagacggataaatggagtcgtgtcataagccagtttatctgcaagacctgttggatagttcttacgtagttcagataaacgttgttcaactgcttcggctgtgtcgagtgcgttagcacctgttgcaattttaattgcaagaccagctgccggtttaccgttaaacttcgagtcgaattgatagttatccgaacctaattctacgcgagcaacatcttttaatcgaacctcagcacctgatgctgtgttctttaagaagatatttttaaactgttcaggagtctgcaataagctttgtgcatttactgttgcgttaagaacttgaccttgtacagccggagcaccacctaactgacctacggcaacttgcgagttctgcgcttgtaaggcagttgcaatatcactaggagtaagttgatagcttgttaatttagctggatcaagccagatacgcattgcgtatgagccaccgaagacctgtacctcaccaacaccggcaacacggctaagcggttctttaattgacgagtttacgtagtctttaatgtcagagtctgacaggttgttatctggtgaatagaatgcaataacttgcaagaagctcgcaccagatttagtaactgttacaccttgacgttgtacatcttcaggtaaaagcgcagttgcagattgcaatttgttttgaacttgaacctgtgcaatatcagggtcaacaccttgttcaaagtttaattgaatagatgcctgaccattaccagcactgttagatgaaatataacgtaagccatcaagaccattcatttgttgttcaatgatctgggttacagtattttcaactgtttcagccgatgcaccaggataagtcgcagcaatcgttacggttggtggtgcaatcgttggatattgtgcaataggcatttttgttagcgtaagaatacccgccaacataatgactaatgcaatcacccacgcaaatatggggcgatgaataaaaaattgtgccattcaatctaccccttatgcatttgaagctgctttctgttctgcttgaggtttacctgattgagccggtttcgcagcatttggtgctgcaccttgagagtttgctggttgagcttgataaggttttgctgatacttcttgcccttctttaactttggcaacaccatcaacaatgactttatcgccggcttttaagccgttagtcacaatccaattttgtccttgaacaccagaggtttcaacaggacgactctcaacaacccctttagcattaacaagcatcgctacagcttgccctgtaggtaaacgagtaatggcagcttgaggaatcaggtaagcatttggaacaacgccctgaacaatttgcgcagtggtatacatacccggaagcaataaatgattcgggttagagaatacggcacgtaatgtaattgttcctgtatcttggtttacagaagcgtcagagaaagcaagttgcccttcgattggataggtagaaccatcttcaagctttaattttactttcgtgttgttactgttatttaaactgcctttacttagttgttgacgtaaacgcaataactcagcactagactgattaatatcaacatagataggatctaactgttgaatcgttaccaacgggtcagtctggtttgcagtaaccaaagcaccagccgttactgaagaacgaccagattggccagaaataggagagcgaattgtagaataaccaagatctacatttgcatttgttacttgagccttagctgctgcaacttgtgcttctgcaacattgacttgaccaagtaagtcatcatattcctgtttagacacagcattactagaaacaagttgtttataacgatttaacttggtacgtagtgaagctagatttgcctgttgttgtaggagtgatgcttttgcattttctaacgttgcacggttcgttctagagtcgagctcataaagcgcctgaccttcacgaacatagcttccttcagcaaataagcgttttaaaatcacgccacttgtctgaggacgaacttcagaaatttgatatgctgaagtacggcctgaaagctcaacgctttgttcaacactttgtggttgagcaacaataacacctacttctgcaggcggcattttctgagcagcagcagcttgctgtttctcatcggagcctttgctacaaccaacaagcgcgatacttgttgctaatgcgcaagcagtaagggctggtgcccaaagcttagccgacatcattgttccacctcgtttagataaaatctaaaaatatatttgttttttacttaacctactttgtgtttgtaataaccagagccaaagcagtgcaatccaaataaaaccaatgccccaaccagcgagtacgtctgttgggaaatgaactcctgcatatattcttgaaagccccatacacacaaaccaaagacaggagatcaaaacaatataaggagagttaatgttgtgcttatggcataacataatcattgccagacaagccagtgttgatgcataaacactatgtgcacttgggaacgatgcaccataactttcaacaatatgatatgcctcaggaggtctaggccggttaacacaccacttgagcagccaacccatggtgatactgccaataactcccaagctaatgaaaataacagtaatatattttttataccatgctaaatatatacatactagaaaggataaaaaacatacaaaaggcatgccgcctacgcgtgcaagaaaggtggttatagtattaagataatctaaacgatggtgactcaatgtttgaacggtgagcaagtccaaagattgaagacttggtacaaaaagaccaagaacacctaatcctaaaaaaacgcaaccaatacaaagcaatagatagggcataaacacacctttgcttattcatatagtttttcactattgaacgccgttgaaagtgtacttgccagtacactttttttcaagcctgatagatcatcgtaaattcattttgaaatttttttaacatttggaaaaacaatcacaacaaaattgacggacatcacattttgtgtacaaagcaaaacatttaatgttctgctttttttccgctattggcttgggcattttcttctaattctagaggctgtttcggtggccagaagaagtcacttggtcgggtaagaaaatgggtcatgaccagtttagctaatggcttccattgttcaaagcgaactcgacgtgcacgtaatgccacaataatagtgagtgtgaaactcacaaataagttggtgagaccaatacagagtacgcctaaaaatgaaactataatcaagccaatatcagggctaccattaatagtcattaaaccttgaatgaagttcgctgaagcaaaagcaatgtgacgaatatctagaggtaggcccaaaataaagccaattgttcccatacttcctaacattacgccaaataggaaattacctgcgagcgcccctaaattacgttcaatatattctgcaaaacggttcaggcgttcttgtccaaataagtttcttaaacgtcgatgtgcttttaaacggggtcctacttttctataaactgccatgttgtcgaagtagcccgcaattaggccagataaaaacaaacacaccccagcaatcgctgcatgcggaacggctaatgacgtaaaagggtttaggctgtgtaatagataagttgccttggtatgagttaataaaggctcatcaagatagaactgccaagcaaaggtaataagagcggcagtaggaattgcaatcgagatattacccaaaatagcaataaactgagttcgaataatattgataataagtgcggctaattctgcaatttgtgcagttttagagcctttacgttgctgtacagttgcagcgagggcagcggctgtcattgcgggttgttttgttgcaacagtaaagtgcaatacatgaatcagaataaagccaagtgaatagttcatactgaacgtaaaggcttgcatgagcggagccatagtcatacgtgcagcaagaatttttaatgaggccatacaggcaataatcacacctgcaccagcagcggctttatacatgccccaaaagcctttggtgtctgtacttacataatgttcgccagtacggcttgcattctctgtgacttgaaaggcaataagctcactggtcgtgctgagtaacgagcggacacttttttcactataatgtgctttagttaagtctgaaattaagtttcctaaagaaacgtagcgtccctcgctatcgtctacaactagatagagtaataattcaatccgatctaaacactgttcaagtaaagacaaaagataggtcaaacttaaactaacaccgattcttttggtcgctcgacgtatttttaaaacgacgtctcgacactgctctagcattacaaatgcttgagaggcatcaggtggtggaagcacagcaatgtcgttgctggaaatatcctgttttttgtacttctctataaactcaataatttcacggttttgtaccaaaaatggcgattcatattcggttaattcaggttgagcgttaataaattcaggataaagaccgataccactaatacggtaagataagacagtaattgccttaatcatttctcgctgaatggcatgcttttcatcgacattactgttactttgcccaataagtccgaacaaagttgcccaatccttgtcatcaacattgtttaaccagattgaatcactttctaaatagaaaatttttccaatcagaatttttagctggcttgcatcttcaataagtggcagaaaatggccgccaagtctttgcccaagctggttccagaagccatctaaagacaaaataccgctatctgcatataagctgacttgcttatattgattaatgaggcgtaataaaaaggtttgtaaaagggctggagcggtaggagtaagtaataggctatcaataaaggcttgtattttttgctctatttcatccgtatcgtgaggatcggatggccgtaaagcattgactaagtcaatgagaatattttcgtcaataacagcttgagggttttcaagctgtttctggattttaaaaaaatgttctgaaaaatttatatgcataggcaaaataatatctactgtattcgatgtaatgcaagccgagttaaattaatcaacgcttgacgataaggtgtatcaggcaagattgataaggcttgcagtgctgcttctgtttcttcttgggcacggcgctggcaatagtctaaagcaccagacttttgcacaatttcaatcactttaggtaattggtcaacaccaccagtcgcaatactgcgtctgataatggcatgctcttcaccggttgaatgtgctaatgctgaaattaacggtaaagtcggtttaccttccattaaatcatcaccaatatttttacctaatgtttcagcatctgaagtgtagtctaaaatatcgtcaataatctggaatgcatttccgaaatgacctgcaaataatcttaaaggttcgcggtaagcttcttgtcctgccaaaatagccgcaccttcggttgcaagttcaaataaacgagaagttttcccgtgaataatttttaaatatgtttcttcggttgtatccggttgatgctgagattggagttgtaatacctcaccttcagcaatttcacatgtacctgttgagaagtcttttaataaggtcatgttgtttaaatcaaccaaaaggtcaaaagcgcgggcaataaggaagtcaccaaccaatacggccgtttgattgttccatgttgcatttgcagtaggacgaccacggcgaagtccagattcatcaactacatcatcatgcactaaagttgcggtatgaagcatttcaataatagctgccagacgctgtgcattttgcatattgtcgaggccgcaagcgcgtgctgcaagtaaacacatgattgggcgcatacgtttgccgccagcttcaactacatgtttactcactgacatgaccaagccgacttttgagctaattccttcattaatcaagtgatccatcgcagcaaagtctgtagcaacaggagcgagaatgtcttgcttaaaatcgatgaccatatgaagaaaaaccccgtattggtagataagtggcgttagtgtatcaattaaaagtgcattaaacagggaaacaagcaattgatattaatcatttgtatgttcatgaagagttctttgttctttatttcggcaaaacgatgtgtttccgacaaaacaataaattttaataacgtcaacatgaatacagcttgttcttgttgcaagttgtgtttggaactgtattttaaattccattcagaatcaatgaaaagtactaaaatcaaattgaagctatttttattatgtaagaatgatggcttctgttgcttagttaaagataaagcacttgtcgtttgatcaaatttcacttaaaatctgtcgccttgtataaccccagtggcgttcgttttaagatcgatatatccctttatcggcacgacgacacgggctgattggagtacgttatgtacgcagtaatccaaagcggtggtaaacagcaccgtgtagttgagggtgaaacccttaaagttgaattattgaaggctgaatctggcgcaactattacatttgatgatgtattaatggttgtaaacggtgacaacattcaaatcggtgctccagttgtagctggcgctaaagtaactgcagaagtgattggtcatggtcgtcacgacaaaatccgcatcatcaaaatgcgtcgtcgtaaacactaccgtaaacaacaaggtcaccgtcaatggttcactgagttgaaaattactggtatttcaggctaatcacgaggagtaagagacatggcaactaaaaaagccggtggatcgacgaagaacggtcgtgattcaaacccaaaaatgttaggtgttaaagtttacggtggtcaaactgtaactgctggtaacatcatcgttcgtcaacgtggtactgaattccacgctggtgcaaatgttggtatgggccgtgaccatactttatttgctactgctgacggcgtagtaaaattcgaagtgaaaggtcaatttggccgtcgctacgtaaaagttgaaactgtttaagttttagcttaagaaaaagcccacattttgtgggctttttttatggaaatacatcaatattgtcttcatgatgatgaatgaaattctacaaacaacatgaataacataacaaaatatcttattttctcaatgattagcacaaagtttgtcggttaatataagtcttgaatgaagagcttgtttagctggattaattgaaaggctagcaagttatcttacagcaactaaaaaggtgatgacatgaatatgcttcgtaaaaccatgtgtgctattacactcagcgcctcagtgcttgctcctgtaatgagtactacagcgttcgctgcacccgtagcagcaccggagcaacaggcaattgggaacctggtaaatcagttatcaggcttacagcgtttgactgccgattttgaacagacaacgaaagcgaatacaaaaactgtagcacagaaaaaaggcttaagtgctcagcatatgaaccagacatttaaaggttcaatgaaagttgaacgtccggggaaattttattgggaaactgtaagtccctctaagcaaactattgtaacaagtggaaaaacagtctggatttatgaccctgatctacaacaggctgtgcgccaaagcctagatgatcaggtcgctgatacaccggctttattactttctggtaatactaaccaaatcatgaagtcttaccgagtaactcagccagataaatctaagttatatttcactttattccctaaaaaagaagatggagctttccaaagcttaacgattagttttggtgccaacaaagcacctacactcatggtattgcaagattctttaggtcaaacgacttatgttcgtttcaagaatgttaaagtaaatgcctcaattccggcttcaactttcaattttacgcctccgaaaggtaccgatattattgatcaataagcctgattatttagaaagccatctttacgatggctttctttttatatatcaagcctagatacattttttaaccccgtcttaaacttacgctttgtatagtggtaggagtgagtttacggggattaacatgcaactttacgataaaaaaattattttcattcttccaatgttagctgccatggttgcggtgagcggttgtcagccaaaatctacggctaaagatgaacaaccggcttctagtgcttcagtaaaagagcaaaagcaagctgaagtccctgtcattcaagcaaaagttgttccggtaaagctgccaaaacctaaagtttgtcttgaagacggctgcactgaatatgattttcagaccgtacaaaccaatcaaaaatggattaatgattattttacgaaccgtataaagaaagcagacccgaatgcttttgcaaatttggctgataaacctgttgaggtaccggaaggggagccgagctcaagtcagagtgcaatctatgtccgttatttagggcaaaattataaccttgcaacctttgcattccagacatattcatactctgcgggggcagcacatggtatgtcacatcaagagtttgtaaattttgacttgctaaataaaaagcacattaccgttgaagaacttattaagccagatgttgaaaaacagttagttgatgcgctttttgatgcaaatactaattggcttcaagagcacaatattagccgtgaaaaactgcaattaagtgataatttctactatggtgcaaatgggattgtttttgtctatccaatttatgaattagcttcttatgcagaaggtatgtctgaattaaccttgccatattttgaagcagctaaatatattaaacctgagtatttaccgagtgtaccgaactataacttataaaatataagatctattctaagaattgtgtgaaagctattcgttatgaagatgatcactatattttttagtgttaagggcttacactatagccagttttttacccatattatgattgattatgatcgaccctaagttactcagaaataatattgaagtcgttaatgcagctttggcaaaacgtggtgttcagttagatgttcaagaatgggcatctttagagactcgccgtaaagacttgcaatcaaaaactgaaaagttacaggcagagcgaaatgccggtgctaaacaagtgggtcagattaaaaaatccggtggtgatgcttctgaaatcatggcacgtatgcaagccattggtgatgaaattaaagctgccgaagttgctttatcagagctacaaaacgagattgagcaaaaagcgcttagcattcctaacttgccggacgaatctgtgccagctggtaaagatgaaaatgataacgttgaaatctcaaaatggggtacacctcgtcagttcgattttgaaatcaaagatcatactgatttaggcgagtggatgggcggactagagtttgaaactgccactaaactcacaggctcacgttttagtgtgttgaaggggcctttagcgcgtctacaacgtgctttaactcagtttatgctcgatacccatactttaaagaatggttataccgaagcgtatgtgccttatttggtaaatgctgattcattacgtgggacaggtcagttaccaaaatttgaagaagatttatttaaacttcaaggtgaaaaagaatactacctcatccctacagcagaagttccagtcactaactttgtccgtgatgaaattattgatgcagatcgcttaccattaaaatatgcggctcatactccatgtttccgtagtgaagcaggttcttatggtcgtgatacacgtggtttaattcgtcagcaccaatttgacaaagttgaaatggtgcaaatcgttaagcctgaaacatctatgcaggcacttgaagagcttactgcacatgctgagggcattttacaggcacttggtttgccttaccgcaaaattttgctctgtggtggtgatatggggttcggggcgactaaaacttatgatttagaagtttgggttccaagtcaaaatacttaccgtgaaatttcaagctgctctaatatgggtgatttccaggcacgtcgtatgaaagcacgctaccgtatggatcagaagaagaccgaattggtgcacactctaaatggttcaggccttgctgtagggcgtactttacttgcagtaatggaaaactaccaacgcaaagacggttcaattgagattccagaagtattacgcccatatatgggtggtgcaacgtttattgattaagctttgcatctaaagtgtgcacggtttttgcttaaacatagtcagatgatcgatgtagaggtttaaggtggatatttttccaatctctttgaagttgcaacagcaacgttgtctgattgtgggcggagggcatattgctttacgcaaggcaactttattagctaaagcaggagcaataattgatgttgttgctcctgcaattgaagatcagcttctgcaattaattaaaacaacagacggcgagccgtttattgaagcttttgctgaaaaatttttaagtacaccctatcgtttagttattgcagcgaccaatgatgcagaagtaaataaaacagtttttgagcagtgtgaagcgcgcaatttacttgtaaatagcgtcgatgatattccacattgtcgttttatggtgcctgcgattattgatcgatctccattaattgtttctgtggcctcaaatggaacatctcctgttctatctcgtcaaatccgtacgcagttagaaacctctattccacatggcatgggcaagttagctgagttttcaggaaaatggcgcaatcaggttaaagaaaaaatttctaatccagatgagcgccgtatattttgggaaaacttgtatgcaagccccttaaaagaacaagtttttaatgacaatctagatgttgccgatagcatgcttgaacaagcactgcaggagtggaaagcacctaaaggcgaggtttatttggtgggtgcaggtccaggtgatcctgaactcattactttaaaagctttacgtttaatgcagcaagctgatgtggtcatttatgaccgtcttgtttctgcacctattttagaattgtgccgtcgagacgcaacaaaaatatatgttggtaaagcgcgttctaaccatagtgttcctcaagaaggtattaatgcattattggttgactacgcgaaaaaaggtaaacgtgtttgtcgtttaaaagggggagacccttttatttttggccgtggtggcgaagagatccaagagttattccaagctggcgtcccatttcaagttgttcccggtattactgctgcgtcaggttgttcagcttatgcaggtattccgcttacccatcgtgattatgcccagagtgtccgctttcttacaggccatctaaaagaaggttctcctgagttaccgtggaacgaactggtatacgaaaaccagacattagtactgtatatggggttggtgggattagagcgtatttgtgagcagctgattgcgcatggacaacgtccagatatgccagttgcattaatttcaaagggtacgacacctgaacagaaggttgtggtggggtcacttgctgatattgcatctaaagtgacagaacatcaaattcatgcgccgacactcacaattattggtgaggttgtacgtttgcgtgaacagttacagtggaattagtaggcttattgatatctgcaaaagagatgtaattattgcctgagctaaccaataagtaatttaagtgagtaattaagtgattcatgttgttctatacgagcctgagattcctgctaatacaggtaatattattcgtctatgcgcgaatacaggcgctcaattgcatttagttaagcctttaggctttgaacttgatgataaaaagcttaaacgtgcagggcttgattatcatgaatgggcaagaatgcaaatttgggacaacatagagctttgtcttgcggacttaaaagcaaaaggtgttgagcatgtttttcctttaactacgaaaggttctgctacgcctcatacagttgatttaaatagacctgtggctttattgatggggccagaaacacgcggcttgcctgaacatgttcgtctgatgttccctcaagaacaatggattcgtttaccaatggcagaaaactcaagaagtttaaacttatctaatgcaactgccgtaattgtatatgaagcatggcgtcagcaaggctttaaaaaattaggttaatttcttaagttctaaataaaaataaggcccttagtggccttatttttatttaagcttgttctagtattttttcgtcatacatgatttgggctgctaaaacttgctcaatattagtttcagcccattcttttaactgatatgccatagcagctacattttgcccaagtggcgtgagggaataatcgacacgaataggggaagtatcctgaatttttcgttcgataaaaccgtctctctctaacatttttaacttctgagacaagactttaggtgaaatcccttcaatattttttttaagtaagttgaagtgctgagtttcatgctcaagaatatttaagatgagtaaaacccatttgtctgcaattttttcaaaaaacagtcgagcagggcaatgttgttgaaaaatattatattttagacattctttcatctaatttaccctctcttttctaaaaaaataggatagttaccaaatggtaactaattgacacctagtatctaaaatatatcattaaatggaatttaataaaacataggttttcttccatgtctaattctaatattgcggttgtatatttctcaggttatggccacactaaagtagtggctgaaacttttgctaatgaaattaatgctcaacttatccagattgatcaggaaggtaatatcactgagcaagattgggaaacattgaataatgcaaaaggtattgtgtttggtgcgccgacctatatgggtacagcaccatggcaatttaaaaaatttgctgatgccacttcaaaagtttggttcacacgtggttggcaagataaagtatttgcaggctttacgaatagtgcaagtttaaatggggataaacaagttacgcttatccagctgcaaactttagcatcacagcatggtggcatttgggtgagtctgggcttattgccagcgaatactaaagatgcaacacgtgaagatgtaaacaacttaggcggttcggtagggcttttagttcaatcaccttcggatgcaagtgtagatgaagtcccaacaggggatttggaaacagctaaagtttatgcaaaacgtgtacaagccattgtaaataaaatatatggttaatgagtccataaaaaaaggcgcttttaagcgccttttttgttattcatgctcattatgttgaggagcattatatttaaagcctttggttttataggcaagataacctaccccaaacactgcccaagctaagccaatttgcaaagcaagcttgtcaatttctaaccacattaagaacacactagcaaagccaagcgttggtacaataatgtaattaataatatctttgatagatttgtttttaccatctctcagcgcgtagcgcgaaatcaccgagaagtttacaaaactaaaagcagttaaggccccgaaactaattaagttaacaatatgttcaaggtctaaaaagccagcagataatgcaaccacaccaacaataagaatgttgtaagtcggagtatgcaatcttgggctaatatgaccaaacaactttttattaataaccccatcacgacccattacatacattaagcgagatacaccagcatgtgctgaaataccggatgccattactgcaactacagcaaaatataaaactaatgttttaaatgcaatgctgccaattgctgcaaccataacaggttgtgattcatctaacggtttaaaatagatgtttggattgctagggaaatacaactggataaagtaagtgcttacgataaaaataatacctgcaagcaatgctgttgagaaaatcgcttttggaagcgttttttcagcatctttagtttcttctgcaagtgaagataaagcatcaaaacctgtaaaagaaaagcacagtactgttgcaccaccaatcaaagcactaatagaagtcatatcattccaaaaaggagttaatgaccataattcggctttatcgggattaagcgtaccatcagcatatacgccttgggtaaggagaatatatacttgataaacaaagtaaaaaataacaccaagttgaataactacaattgtactgttaaaacgcgcgacaaagcgtgcgccaaataagttaatcacagtcattaatgcagttaagccaataacccatagccaattatttacttctggaaacaaagctcttaaataaatatcggccaaaatgatattgacgagtggtgaaagtaaatagtctagccaagatgaccaacccaccataaaaccaacattagggtgaattgacttttgggcgtaggtatatgctgatcctgaagaaggatagcgtttgatcatgtgtccataactgatcgacgtcaataaaattgcaactaaggcaaagatataagaagtaggtacatgaccaccacttcgttctgatactaaaccaaaagtatcaaataaagttaatggctgaatataagctaaaccaataataatgatgtgccaaagcacaagattcttttgaagtttagctgttggtttagtcccagataagtttgtcaacggcgttatcctcataatcgttgatcaaggatcagcttggtgttaaggatcgtttgagacgaacgatcccccctacataaaagataaagtgcgccaatctatcctaaattgatgcaaattgtcagtactttcgtggattttttagcaaattttttgccatatttccaaagaaaatgatgaataaaaattcatagatataaaaaaggtctgatttgtcataaaaatcagacctttagcttttttctttagatatctaaatcttaacttaccaagctttttgtaagatctctcgtagatcttttaagcttgcttctttaggattataaataattgagccatcatttagtgctttctctgccacttcatcaagctgtgcttcagtaactttacctgtttcacgtaaggtacgtggtaatttggttaagctaaataaacgatcacgcattgctaaaatagttgcgattgctctgtctgcacgctgagtagcaggagtctgggcataaatatccgcacctgcaagtggtaatagcaactcgccaattttctgaccattgacttgtttattgtactcaagcacataaggtaagaataagttcatgcacagcccgtggggcaggtgagcaactgcacctaatgcatgtcctaatgagtgtacaaggcctaccatcgagttagagaatgcgatacctgccattgtagaagcttgtgcaagttctaaacgaccttgtgagtcatttggattttctaagacattaaataggttttcgctaatttttttaatacctgcacttgcataggcatcgctaagcgggttagctgccatacaggtgtatgcttcaacacaatgtgttaatgcatccatgcccgtcattgcagttaagtgaggtggtaacgttaatgtcatgcgtggatctaaaatcgcagcatgtggcattaagtaatatgaagcaaatgccaatttaacattcttttgtgtatcagacacaacagcaaccatggtcacttcagagcccgtacctgatgtagtcgggatgacgaaaaatggttttaatggttttggtaggttgtgtgcaccagaatattgaagaagatcatctccaccttctgatactaaaatgttagttgctttagaggtatcgataacagaaccaccacccacagcaataatcgcatcacatttatttgtgcgataagcttccgcggcaagtcgaacaacttcaaggcttgagtctggtggaacatcatcaaaaacatgaccaatgactgcatcagttgtgctaaaagcagcttcaatagggtttaacaagccatttgcacgaacacctttatcggtaatgataagagggcgttttgcacctaaagtcgcaagttcaaacggaatatgttctaaagcagcattaccggcaatgacttttacaggacaaaagaattcgtaatatggtttagccatgttatgcgctccgcttgaagtaagacttagctacttttaaataaatatttgcagcctggttgaatttttcttttagggtaagttcagttgggtattctttaacagcgagtgaagccaccaatttcggtaaaatgagggactccattttattgaggcagcgaactaaacgaattgctgcagatacatcaccatcagcaatcatacggtcatttgcaaaggcttgagcagtactttcctgaaaagagaaaaccaaaaaagcatgagttacatgcttaaacgtaatggttaaatcaggctttttttccgctcttttcagcagttctaattgtttatcttctgtcactcgtgcaaaaaatgctggtccatttgggaagacattcattgaaagtacaaagtgaacaggaaatttagacacttcctcttgtatttcactatctacttgactcgccatgactaagcctcgaccaacaacgtccatcatgagcttaacgtaggcaagttgcagagtgggctttacagcttttgtcgaaatcacttgctatcccttcttaaaattatgcaaaagcaaatttagagtaattactctaatatatttttattccatctcaaaatcatttattcaattttgacttctgggtcattaaagtacccagtacctttaatatactcaataaagtcctgacaaagttgttcaaataatggatatggagtcactaaatcttgtatgcggaccatttctagccctgcataaccacatgggttgatggtttgaaaaccagttagagcacagtccaagtttagggctaaaccatgataactacgtccacggcgaattttgaagcctaatgaaccaatctttctgccatccacataaacgcctggtgcatcaggttttgcatatgcttcaatgttatatttctttaaaacatctatcataaattgttcagcaaaactgaccaatgtgcgtacattccatttcagtcgattaaggtcaaacataaagtaagcgacgagttgaccaggaccatgccaagttacttgtccaccacggtcagtttgtactacaggaatgtttgatggaatcagaatatgttctggttttcctgcctgaccttgagttagtacttcatgatgctggagtaaccacagctcgtctgctgtattttcatcacgttgattggtcaggttcttcatcgattcgaatttgctttgataatcttgtaaatcgttccactgacgaataatcaaagtgggtttatcaaggctcattaaacattttcctgtgcatagtacttaacagaagggaagtctctcaactttaaattatgagagtatgcttttgatgagtttaaagtattttgcttaagcggttctaaatatttgtaattatttctataaagattggtataaataaaaatgccatgacattaaatttgtcatggcattttaaaattaaagcgcagttcttatttgcggacaagcagccaagtctgcatataaagcatgcacttgttccaattcatcaaagcgtaattgcgcggttaatgaatggtatttgcctgtacgtgattcttgtacttttaacgttgtttggtcaaagtcaggaaaatgtttcactagaatatcaacgacagctatacgtaattcttcacccgcatcgccaatgagtttaattggatagtccattggaaatacccaaaggtcttcacggagttcgcgagatggagtgcggtctaacataagtaacctcatcatgtgaaacgcctgcatcatcgcaggcgtttatagctctttctattaaatggggactagtctcgaaatttcaagatttcaaaaattagtcattctctaggaaagaacgcaagtgttcagaacgagaagggtgacgtaatttacgcaatgctttcgcttcaatctgacgaatacgctcacgtgttacatcaaactgcttacctacttcttctaaagtatgatcggttggcatatcaataccaaaacgcatcttcaatacttttgcttcacgttcagttaagttttctaaaacttcacgagttgcttcttttaagccttctgaagtcgcagcatcaattggagaagtgatgttctggtcttcaatgaaatcgccaagatgcgaatcttcatcatcaccgattggagtttccattgaaattggctctttcgcaattttaagaaccttacgaactttaacctcatccatttctaagcgttcgcctaactcttcaggagtaggttcacggcccatttcctgtaataattgacgcgatacacggttaattttgttaatcgtttcaatcatgtgtacaggaatacgaattgtacgagcctgatcggcaatagaacgggtaattgcctgacgaatccaccaagtcgcataagtcgagaatttataaccacgacggtattcaaacttgtctacggctttcatcaaaccaatgttcccttcttgaatcaagtcaaggaactgtaaaccacggttggtatattttttcgcaatcgaaattaccaaacgaaggttggcctctaccatttcttttttcgcacgacgagctttggcttcaccaattgccatacgtttagaaatatctttaatttcactaacgtttaggccaagctctttttcgatatctgcaattttttgctggaaggctaaaacatcaggacgcactttttccaagtgagccttgatttcagctggagctttagcaatttgttcatctaaccaagcaggattagattcctgtttcgggaaagatgtacggaactggttacggtccatacggccacgacgtactgcataacgcataatttcacgttcattggcacgaatttgttcatgagttccgcgaatcatttctgaaatgatgtcaaataaacgtggagtaaatttaaacatcataaatacagttgctaaagactcaagagcttcatttgcttcagggctattacggccatgtttttcgatgacagctttagtttgagcccatgcagcttctaattcagcaaaacgaacttttgcaacttcagggtctggacctgaatcaccttcagaatcatcatcaccttcagactcttcttcttcatcgtcatcatcaagcttaacttctttcgttgactttgtagatgattcgtcttcttcctcaagctcttcaacatcttctaaaacttcaggaatatcttcgtcagtttcagggtctaaataaccagataagatatcggcaagacggcgttcgccagttaaaaaatcattatattcttttaatacaacttcaacagcatttggccagtaagcgattgagttcaagacatcacgaatgccttcttcaatacgtttagcaatgctgatttcaccttcacgggttaacagttctactgtacccatttcacgcatgtacatacgtacagggtctgtcgtacgtccaggctcattttcaacagatgcaagtacggcagcagcttcttcttcagcaacttcatcagttgcatcagctgattcgccgaacatggtatcgtcagattcaggtgcacgctcgtgtacaggaataccaacgtcttgaagcatctggatgatgtcttcaatctgttcgctttcagtaatcgagtccggcagatgatcgttaacctcagcgtaagttaagtaaccttgttctttgcctcggctaatcagagccgctacttgagaagtaggggaatgcatatcgctcatctttgcttactctttgttgaatctgtggcagtgaaaaaccgtgcatgatagcacaatttgcttgaaatgtttgggctttgatcggtgaccgttaaataaaaaatatctttgaattcacgactattttttgaatattgggctaaaatcatttttttcaaggttaaatcatagaaaaatttgtagaaatcttcgcttatcaaaagattgttctgttttataaatacacaattttttgggtgaaaaaaagtacaaatgagcaattaaatgaaaaaaatataaataaaacttgacaaggaaaagtaagacagataaatagcggctagacccattcacattttttcattatgaggtagttttagtgtcttctacagattttgaactagatgataactacggcgatgatgatgatgtcggttttgatgagtcatcaggcaaaatcagtgcaaaagaatcgttggaaaaacgtagattaattgatgatctattggcacagcgccgtttagagcgtgagttaaaagatttcgattatgatttagacgatgatgatcttgatgacgaagactaatcaaaactaaatagggcatcgtcagcttaagtgctatgctatcgtcaatttctttttaaagtcaggtaacacacaatgagtgcattagatttagaccaattaagtgaatatctagatggagaccacaatgaatatggtctagactttgctgcaactcatggatttttgtgtgcaattgcagtaggtcctcagtttgaccgttggttagatgaattgttcgaaggtaaccagaaaaaggttccggctgaaattattcaacaaatcaaggtttggctagagtcgattcgtcaagatttagcaaatgaaaatgggattgaatttccatttgaagttgaagaagctgacgttgaatcaagcctaggtgattggagtgtagggtttgttgacgcaatgttcttaaacgaagaggcatggtttgcccctgagtatgaagaacaattggttgatttgactttaccaatcatggtttttagcggaattgatgaagaagatccacagatggaatctttccgtcgcaatggacagttaatggatgaactggcagaagaaatcccagataatttgaatgagttatatttgatgtaccatactccaaattaatttattagaagaaataataaataacgtcctttctagggcgttttttatgtttttagtatttttaatacataattaaatataatatttttacattaattttatttctatataattaccagcaaaattttttgatattactctcttaatcaaaaaattaatttatctcgccatgaatattttattggcgtcatgaaaatctttaatatgttaacaacgtgatttaatatgaatataatttttaaaattactagcgtactctcagtaatattacttgtagcctgcggtgatgaaaatagcaacagtgtcagtgaagaaaaaattgcacaatctacccaaaatcaagttacttataaactaatctctggtactgcattttcaacttctgttttaaatggtgcaaatgtaacagcaatttgtaaagatgggcttggtttcaaaaataaagtaattgttaatgcacaagggcaatggcaaggggaaatagacaccagtaaatttccttgtcgtttagaggcaaaagctgaggggcaaacttatcatagttatatcgaccatgagggaagggtaaatattaacccgctcacagatatggttgttgcttatgcaagtaatcaggttcctgtaacatggtatcaatctggaagtatgactacagaaaagttaaattcggcaaattctgctttggtcgctgaacttattaaaaaggggtacggtattaataatgatatggatctatttactgctgagatgaaagcaaataaccctattcatcaagctattcaagagttgttggaagctattcagaataatagaaatattaaagattatgattcactattaatgttaattaaagatgggaatttatctcaagtacctgagaaaatagagtttttaaataatagtgtagcaaaagtttttggttttaataaagatgcttgccaagtacttccgaaaacagaaaataccgaacaatataataaatgctctgataaggttattgatgatttttcggaaagtaatttagttgctactgattctgatgaaaaatgtattttggtcaaacaagggaataaagtaagtttcactaaagggaatcaaacagtatcggcattattggataaagaacaagaggatggcatggactttacttttgatgaaggtgaattagaaattatagatcttataattaatacaggaccttatacagatataaatacctatagtcagattggattaagcttttctagtgatgggaaattgagggctgttgttggaaaatctccaatagtgtcttcaatgaattgtgctagcccagagtttaaaaagcttatggagctttataaataaaatagaaaaaagagggcatcaaatgatgccctcttttaattataaacgtttacgtttagcggcagcaatttgtgattggcgcatacggaaaccagctttttgtttttcagtagttttatcaatacaatacaagcaagaaacaccatgttcatagcttggtagcgcagactcttcaggagttaaaggccagccacaagcatgacatttaatgtttgcaccttcttcaacaccatgagttacagcagtacgtccatcaaatacgaaacattcaccttcccaaaggctttcatcaggaggagtttcttctaaatatttaagaataccgcctttaaggtggtaaacctctttaaagccttcttgaagaagcaaagaagttgatttttcacagcgaataccacccgtacagaacatcgcgattttcttatctttatgttgttctaactctttttttacatattcaggaaattcgcggaaagtttctgtttttgggtcaatcgcccccttgaaagttccggctttatattcatagtcattacgtgtgtcgattagaatcacatcatcacgtgcaataagctcattccattctttaggatcaagatagtgacccactaaatcacgaggttttacttcaacgcctaaagtcacgatttcttttttaagcttaattttcattttacggaaaggtttgtcagaactatgggattctttatattccatagcgttaaagccttcgtttaacaaaaattgatgaatcgtatcaattgcctcacggtccccagcaacggtaccattaattccttcacctgctacaatcagagttccgcaaaggttaattgttttcactaagtctaaaagacgttgttgaagatcagctggatcttgaacttctttaaattgatatagtgctgcaacaacccaacccgcggtcgcttgctgttctacaggtgcaagctgttctacagtagcgttcatggaaaactccaaatgtattaagatagaaatttaaggcgcatattttagcgcgaaaattcgtaataagcgagaaaaccataaaaagtatatggtttatttaaggagtctgttttgagtagtgatcatcgaatgctctctctcaccccatgtgcagggcgttgttcaacagtttttggtgatcaggtgtgtcgtggttgtcgccgctttaaccatgaagtaattcaatggaatacctatacggcagagcagcgtttagctgtctggaagcgtttagatgatcaattggatcagattttggtacctatgttgccgcaggcgaatctacagcatgtagaaggatttatattaggtaaacgtgtcaggttaatggaaggggcgagtaaagggcgtaaactctaccatgccttaaaaatatgtgaaaagaataagcatttagctcatgagagtggtttagggatttcagaagcacaagttaaagaagtatggactgagtttgaaagacgtattttagctttggctaaagcaagttatgagttggcttggttaagagctgatggtattagtcatcacttattaaatatgtttgaagaagaataacttttaaaaacttatttataaaaaaaagctgccattaggcagcttttttacattaatgttctttcgaatattaacgcttgatgtcacgttgcacttcaccagtgtaaagctgacgaggacgaccaattttgtaaggaccgctgtgcatttctaaccagtgactgatccagccaactgtacgtgcaagagcgaagataacagtaaacatttctgttgggataccaatcgctttaaggatgataccagagtagaagtctacgttagggtaaagtttacgttcaacaaagtacgggtcgttcaatgcaatacgttcaagttccatagcaagcgctaattgaggatcattgatacctaatgcttcaagaacttcgtcacaagtttgcttcatcactttagcacgtggatcgaagtttttgtaaacgcggtgaccgaagcccataagtttaacttctttgcgtttaactttttccatgaactcagcaacattttcaacgctaccgatttcatcaagcattttaagaactgcttcgttcgcgccaccgtgtgcaggaccccaaagagcagagataccagcagagatacacgcatatgggttcgcaccagtagaaccagcaagtcgaactgtagaagtagacgcgttttgttcgtggtcagcatgaagcgtaaagatacgatccattgcacgagcaagaacagggtttactttgtagtcacggtctgcaggagttgcaaacatcatgtgtaagaagttttccgcgtaatttaagtcattacgtggatagatgaatggctgacctacagtatatttgtagctccaagcagcaagcgttggaattttagcaatcaaacgaatcgcagtaatttcgcggtggttgatgtcttcaatgtcaaggttgttgtgatagaaagcagataatgcgcctactacaccaaccatgattgccatagggtgagcatcacgacggaaaccattgaagaaacggctaacttgatcatgaaccatagtatgagcacgaactttcgcatcgaactcaactttttgttcagcagttggtaactcgccatttaataataaataacaagtttcaaggtagtctgcttgagtcgctaactggtcaatcgggtaaccgcggtgtaataaaatacctttgtcaccatcgataaatgtgattttagactcgcatgaagctgtcgccataaaaccaggatcaaaagtaaagtgacctgaggccaatacatctttaacgtcgattacatcgggacctaatgtgccactgtaaattggtaattcaatttctttgccatcaagatgtaatacggcttttttgccagttgcttcagacattcaatagatctcctgtcctggtgaatgattatctgactcgaaatcctaattttctcatgtgcgaatcagacggtgtcaaaatttgctataagattagtgagtactgaaattttgtcaattatacttatggataaaaaatgacgttcccacagagagttagtcatcaagacccgagcaaaaaaagtcagtaaaatcactgcatcgggatggtatcataagtcaattcaagaagaacgtgcagaaaaaaaatgaagcgtgagtacaattgtaagcaaatttttaaataaaaattaagaatagggtaacgttataaaatgccaatctgattaaaaaaatcataaaactcaggctgtaattttaaattgtgattcaaaaatcgccacattatcactatttgataattccaaaagttgtcttttttttaagtttaattgtttaaaaaatagctcattgaacagtctagaaaaaattaaaactcattttttgtaaaaatagtgatcattgttaacagtcaagtagcactttatttcttttaatataaatacggataaaccctctttataggtaaaactgaataaaattagcaggtaagaagcagttttatttatatttttgtcttgagttgatgatttattaactttatctttagtctaaaatgcacttattttaaataaaactgtagaaaagcaattttttataaaagatgaaattaaacaagcacatgttttgtttaatcttaacttcgggatagggaaggatgctgtttggctatgtgaatgattcttatttgatgagtttttgcggaaaagccaaagtcgattgtttgtattttgatatttcgcgttttataattcagtgtcgtttataggttaggcatgagctgtgcttgcctaacaatgccagctttccttggaattaattcaacaaactccggtcggagtttctacctacaggatgcccgctgtgaaaagcaacagacctgtcaatttgtccatgggtcaggtgttagcggtaaatttacgctcacccgtggctattgcatcaattttacaccgtttatcaggtgtcatcgttttcttattagtaccagttctcttatggattctagataaatcattatcttcaccagaaggatttgactacgttaaaaatgtcgtttttggaaatatcctcgtacgttttgttgtgtgggtatttgtagccggcttgattttccacttcattgctggggttaagcatttgcttgcagatctaggttttgctgaagaactgcaaagcggtcgtattgcagcgacaatttcattgatcttatctgtggtagccattatcgcagcctttgtatggattatgttctaatgaaaagtgctacaggtttaacaggttcaggttctcgtgattggtttatccagcgtgtaagtgctgtggtattggcagcttatactgttgttctttttggttggatcctctgcaaaggcggatttgactatcaacaatgggctggcttcatgatgacattaccaatgaagattttctctttattggcaattttgtcgcttatcgcacacgcatggattggtatgtggcaggtttttactgactatgtcactactcgtcaaatgggtccttcagcgaaaggtttacgccttgtactgactacggctgtcattattgcagtgtttgtgtacgcaatctggggtatccagattttctgggcgaattgataggaagatatcatgggcgcgataaaccctaaagaagattattcaaatattcaaaacctcactttcgatgctgttatcgttggtggtggtggttctggtatgcgtgcatcttaccaacttgctcaagcaggtttgaaagttgcagtacttactaaagttttcccaacacgttcacatacagttgctgctcagggcggtattggtgcgtcgttaggtaacatgcaagaagataactggcatttccacttttacgatacagtaaaaggttctgactggttaggtgaccaagacgcaatcgagtttatgtgtcgtgaggcgccaaaagttgtttatgaacttgaacacttaggtatgccgtttgaccgtaacgctgatggtacaatttaccaacgtccattcggtggtcactctgcaaactatggtgataaaccagttccacgtgcttgtgctgctgctgaccgtactggtcacgctttattgcacacgctttatcaaagcaacgtgaaaatgggtactcaattcttcgttgagtggatcgctcttgatttgatccgtaacgaagcaggtgatgtactcggtgtaactgcaattgaccaagaaactggtaacattgcagtattccaagcaaaagcaacattatttgcaactggtggtgctggtcgtgtttaccgtgcatcaacaaatgcttatatcaacactggtgacggtcttggtatggctgctcgtgctggtattccattacaagatatggaattctggcaattccaccctacaggtgttgcgggcgcaggcgtattgttgactgaaggttgtcgtggtgaaggtgcgatccttcgtaacaaagacggcgaaccattcatggaacgttatgcaccaactttaaaagacttggctccgcgtgacttcgtatcacgttctatggaccaagaaattaaagaaggtcgtggttgtggtccaaaaggtgattatatcttgcttgatatgactcacttgggtgctgacacaattatgaagcgtttaccatctgtatttgagattggtaaaaaattcgcaaacgttgacatcactaaagaaccaattccagtagtaccaacaatccattatcaaatgggtggtattcctacgaatatgcatggtcaagtgtgcttaccagagcctggtacagacaactacactaaacctgtaaaaggtttctatgcaatcggtgagtgttcatgcgtatcagtacatggtgcgaaccgtttaggtactaactcacttcttgacttggttgtatttggtaaggctgctggtgagcacattatcgattacgtaactaaacatcatggtgatgaatatgcgccgcttccaacaaatgtattagagcaaactttagctcgtgtacgtaaattggatgaatcaacttctggcgaaaatgctcaagaagttgctgatgcaattcgtgatatcgttcaagaccacgcaggtgtattccgtactcaagcattgcttgataagggtgttaaagagattcttgctcttgaaccacgcgtgcgtaacatccacttgaaagataaatctaaagtatttaacactgcacgtgttgaagcgcttgaagttgaaaacttatatgaagttgcaaaagctacattaatttcagctgctgcgcgtaaagaatgtcgtggtgcgcatacggtagttgattatgaattaccagctgatcacccaacttattcatacggtcgccgtgatgatgagtggatgaaacatactttatggtattcatcagataaccgtttggaatataagccagtgcgcttcaagccgttaactgttgatccaattccaccagcaccacgtacattctaatcgggagtataaagatgagtagaggtactcgtacattcgaaatctaccgctatgatcctgataaggataaagcgccgtacatgcaaactttcaagcttgaattgactgataagcaccgtatgttgcttgatgcattgcttgctttgaaggttcaagacgaaacgttaacattccgtcgttcttgccgtgaaggtatttgtggttctgatggtgtgaatatcaatggtaaaaatggtttggcttgcttgcaaaaccttaacgatttaccagagaaaatcgtaattcgtccattacctggtttgccggttgttaaagatttggttgttgatatgaaccaattctatgatcagtatgacaaaattcagccattcttgattaataaccaacctgctccacctaaagagcgtttgcaatctcctgaagagcgtgaacacttaaatggtttgtatgagtgtattctttgtgcatgttgttcaacttcatgcccatcattctggtggaaccctgataaattcttgggtccttcagcgttgttgaatgcatatcgttttattatcgactctcgtgatactgcaactgcagaacgtttggctcgtcttgacgatccgttcagtttgttccgttgtaaaggtattatgaactgtgtgtcagtatgtcctaaaggtttgaatccaacaaaagcaatcggtcatatccgtaatatgttgttagatcaagcgggttaattctgcgcaaatagagaacgcacatccttgatgtgcgtttttttttaattttataatacgtgtcttatactttagtcggtaaaagaggggtttttatataaagcaccatatattaatagataaaattggatatgtatttcgccaatttatagatggtatgtgtcaaaaaaatcaatcgttcgttaagaacatgatacgatttgccacaaagttataggtgaaaaaagcgtatactagtgaaattaaattaagtggcacgatcttagatctgtgcttaatttttatggttaaagtcattttagaaaagttaattttaaagttaatttttctaaaaagatttgcaaaaaattgctcggttttttatcgagtataaggtgagtgatgatgccattgagggcgttgtgattcattaattacctatggagttttctctctaggtagtatgacgccccatggtcttgaagacctgttgggtaagtagtgtcatttttaccaatttgacattatgcatcatgggtatgcttaaaaggcagcctgtaatattttttgcaataggaaatgggtccacaaatgcaagaagttgctgacgcattgcgtcttgacactgaactttccgctgatagtgcagcgtatattgaagaactttacgagcagtacctgacttccccaacctccgtcgctgaggactggcgccaatatttcgataaatatccaaagggtgaccaaccacacagcgctgtgcgtgagcaattcctattactaggacgtaatgctaatcgtgttcaacctgttgtacaaagtactgtcagtactgaacatgagcgtcgtcaaattggcgttttacaactcattgctgcttatcgcaatcgcggacatcaaaaagctaagttagatccgttaggtcttgctaagcgtgaagatattcccgatttagatctttcagcacacggtttaaccaaatcagatttagacacagtattcaacacaggcaatcttgagatcggtaaaagcgaagcaacgcttgctgagatgattgaagcaatggaagcaatctattgtggttcgatcggtgttgaatatatgcatatcgtggacacaaaagagaaacgttggattcaacaacgtcttgaaagtgcccgtggtaaattcaatttctcaaatgaacaaaagaaaggcttcttagagcgcttaactgctgctgaaggcttagaaaaatatctcggtaataaatacgtcggcgctaaacgttttggtgttgaaggcggcgaatcttttattcctatggtaaatgagattatccagcgtgctggtgccgtaggttgtaaagaagttgttatcggtatgccacaccgtggtcgtttgaaccttcttgttaatattatgggtaaaaaccctgcggacttatttggtgagttcgaaggtaaagcacttcataagaaaggttctggtgacgttaaataccaccaaggtttctcaagtaatgtaatgactccaggtggtgaagttcacttggcattggcatttaacccatctcacttggaaatcgttggccctgtagttgaaggttctgtacgtgcgcgtcaagtacgtcgtagagacatcggtggtgatgacgtattaccagttattgttcatggtgatgctgcatttgcaggtcagggcgtgaacatggaaaccttccagatgtcacaaactcgtggctatacggttggtggtacagttcatattattgtgaacaaccaagttggtttcacaacttctgatccacgtgatgcgcgttcgacagaatactgtactgacgttgctaaaatgattcaggctcctatcttccatgtaaatggtgatgatcctgaagctgttatctttgctactcaattagcacatgatttccgtcacgaattccgtaaagatgtagtcatcgatttgttctgttaccgtcgtcgcggccataacgaagcagatgagccatctggtacacaaccattgatgtatcaagtgattgcgaagaaagcaactactcgtacactttatgctgatcaattggtacaagaaaaagtacttgaccgtgctgaagctgaccaaatggttgaagattatcgtgctgatttagaagcgggtaatcatgtagcgaatgctttgattcttgagccgaacactaaaatgtttgtagattggactccatatttgggccatgaatatacagacgattgggatacttcatttgacataaatcgccttaaagagttaggcgagggcatgagcaagcttcctgaagggtttgtaatgcagcgtcaggttcaaaaagtaattgaagaccgcgtgaaaatgcaaactggtgaaactccattgaactggggtgcagcagaaactttagcttatgcaactttattagatgaagactatctagttcgtattactggtgaagacgtgggtcgtggtaccttctcacaccgtcatgcgaaattgcataaccaagttgatggttcaacttacattcctctttgccatgtgaaagagaaccaaccgcgttttgcgatttatgactctcttttatctgaagaagcagttcttgcgttcgaatatggttacgcaactacaattcctaagagcttgattatttgggaagcacaatttggtgacttcgtaaactgtgctcaagttgtgattgaccagtttattgcttctggtgagactaagtgggagcgtgtttgtggtttaacaatgttgttaccacacggtttcgaaggtcaaggtccagagcactcttcagctcgtttagaacgtttcttacagttatgtgctgaagacaacatgcaagtgatcactccaacgacacctgcacagattttccatgcattacgtcgtcaggctgtacgcccaattcgtaagccattaatcgtaatgtcaccgaaatctttacttcgtcataaacttgcgacttctactttagaagagctagcacatggttcattccaaactgtaattgacgaaatcgatcaaattaacaagtcagatgtaactcgtcttgtactttgtggcggtaaagtttattacgacttactcgaaaaacgtcgtgaacaaaacttaactaatgttgcaattgtacgtattgaacagttgtatccatacccagagcaacgtcttgcggaaatcttggctgcttatccaaatgtgaaagaactcgtttgggcgcaagaagagccgaagaaccaaggtgcttggttgtttatcgcaccgcgtttatatgacgatatcttaaaatctggcaaacaaatccgtatcagttttgcaggtcgtgaagcttctgctgcaccagcttgtggctcaccgtacttgcatgcaaaacaacaagctcagctaattaatgatgcattggcaatcgaagctgaacaatcaggagattctcaataatggcaaccgaaattaaagcaccggtattcccagagtctgttgcagatggaaccatcgcaacttggcataaaaaggtgggtgaacctgtatcacgtgatgaagtaatctgtgatattgaaaccgacaaagttgttttagaagttgttgctcctgcagatggtagcttggttgcaatcattaaaggtgaaggcgatacagttctttctgacgaagttattgctcaattcgaagctggtgctggcgcagcggctgctgctcctgcggcagtagaacaagcagttgctcagactcaagctggtgctgctcctgttgttgagcgtaatgaaactgtatctgatcaagctcctgcggtacgtaaagcgttaactgaatctggtattgctgcttctgacgtacaaggtactggtcgtggtggtcgtattactaaagaagatgttgcaaaccatcaagctaaaccagctgctaacgttactccattaagcgttgctgttggcgagcgtatcgaaaaacgcgttccaatgactcgtttacgtaaacgtgtagctgagcgtcttcttgcagctactcaagaaacagcaatgttaactacatttaacgaagttaacatgaagccaatcatggaattacgtaagcaatataaagatgctttcgaaaaacgtcatggtgctcgtttaggcttcatgtcattcttcgttaaagcagcaactgaagcgctaaaacgctacccagctgtaaatgcttcaattgatggcgatgatatcgtttatcacggttactatgacatcggtgttgcagtatcttctgatcgtggtcttgttgtaccagtattacgtgatactgaccgtatgagctatgcagaagttgaagcaggtattgctgcttacgctgctaaagcacgtgatggtaaattatctatcgaagaaatgactggcggtactttcacaatcactaacggtggtactttcggttcattactttcaactccaattttgaaccagccgcaaactggtatcttggggatgcataaaatccaagaacgtcctatggcggtaaatggtcaagttgaaatcttgccaatgatgtacttagcgctttcttatgaccaccgtatgatcgatggtaaagaagctgtaggtttcttagtagcaatcaaagaattgttagaagaaccagctaaactcattcttgatctttaatttcttcgaataaatacctatcagggtagagtaatcctctatcctggtttatggagataaaaatgtctcaacaatttgatcttgttgtcattggcggtggtcctggtggttatgaagctgcgattcgcgctgctcaactaggcttcaaagtcgcttgtattgaaaaacgtattcacaacggtaagccttctttaggtggtacttgcttaaacgtaggttgtatcccttctaaagctttgcttgattcttctcatcgttatgaagatacagtgcatcatttagctgatcacggtattacaactggtgaagtgaatttcgatcttgcaaaacttcttgctcgtaaagacaaaattgttgaccaattaactggcggtattgatcaattgcttaaaggcaacggtatcgagtggttaaaaggtacaggtaaattacttgctggtaaaaaagttgagtttgttccacatgaaggtgaaactcaaattttagaacctaaatacgtaatccttgcgtctggttctgtgcctgtaaatattcctgtagctcctgtagatcaagatattattgttgattcaactggcgcattaaacttccctgaagtacctaagcgtttaggtgtaattggtgcaggtgtaatcggtttagaacttggttcagtatggcgtcgtcttggtgctgaagttgttgtatttgaagcaatggatgcattcttgccaatggctgataaagcactttctaaggaatatcaaaaaatcttgactaaacaaggtttagatatccgcattggtgcgaaagtatctggtactgaagtaaacggtcgtgaagtgactgttaaatacactcaaggtggcgaagataaagaacaaacgtttgataagttaatcgtttgtgttggccgtaaagcttatgctgaaggtttattagctgaagattcaggtattaaattaactgagcgtggtttagttgaagtaaatgatcactgtgcaacttctgtagaaggtgtatatgcgattggtgacttagtacgcggtccaatgcttgctcataaagcaatggaagagggcgtaatggctgttgaacgtattcatggtcatgcagctcaagtaaactatgacacaatcatttctgttatctatacacaccctgaagcggcgtgggttggtttaactgaagagcaagctaaagaaaaaggtcatgaagtaaaaactggtcaattcggttttgctgtaaatggtcgtgctttagctgctggtgaaggtgcaggttttgttaagtttgttgctgatgcaaaaactgaccgtttattaggtatgcatgtgattgggcctgcggcatctgatatcgttcaccaaggtatgatcgcacttgaatttgtatcttctgttgaagatcttcagttgatgacttttggtcacccaacattctctgaagttgttcatgaagctgcacttgctgtagatggtcgtgcaattcacgcgattcaacgtaagcgtaaataaaataaagagcggtcctccgctctttttcacattcgatggtgtgattaaaaaatcatcaagttgatagacgtagacagcaatttgcttatacaacatgagaatgttgcgcaaattgaagacaacaaacaaagttaagtaggtaactaaatgaacttacatgagtatcaagctaaagcgttattgaaagaatatggtatgccggtacaagaaggtatcttggcaaccaatgcagacgaagcagttgctgcatttgaacagcttggtggtaaattcgctgtaatgaaggcgcaagttcatgctggtggtcgtggtaaggctggtggcgttaaagttgcaaaatctaaagaagatgttatcgaatttgcaaacaatatcattggtactcgtcttgtaacgtatcaaacagatgcaaatggtcaaccagtaaacagcatcattgttgctgaagacgtatatccagttgagcgtgagctttacttgggcgcggttgtagaccgttctagccgtcgtattactttcatggcttctacagaaggtggtgtagaaatcgagaaagttgcggaagaaactccagaaaaaattatcaaagttgaagttgatccattagttggtttacaaccattccaagcacgtgaagttgcgtttgctttaggtttgaaagacaaacaaatcggtcaattcgtgaaaatcatgacagctgcttatcaagcatttgttgaaaatgatttcgctttatttgaaattaacccactttcagttcgtgaaaatggcgaaattttatgtgtagatgcgaaagtaggtatcgactctaacgcgctttaccgtttacctaaagttgctgctttacgtgataaatctcaagagaatgagcgtgagttaaaagcatctgaatttgatcttaactatgttgctttagaaggtaacatcggttgtatggttaacggtgctggtcttgcaatggcaactatggacatcattaaactttatggtggtcagcctgcaaacttccttgacgttggtggcggcgcaactaaagagcgtgtaatcgaagcgttcaaaatcattcttgctgatacgtctgtacaaggtgttttaatcaacatcttcggtggtatcgtgcgttgtgacatgattgctgaagcaattattgcagcggttcaagaagtaaatgtaactgttccagttgttgttcgtttagaaggtaacaacgctgagttaggtgcgaaattacttgatgaatctggtttgaaattaatttctgcgaacggtttgtctgatgccgcagaaaaagttgtagctgcagttaaagcgtaaggggagtatcaatcatgagcgtattaattaataaagacactaaagtattggtacaaggttttactggtaaaaacggtactttccactctgcacaagctttagactacggtacaaaagttgttggtggtgttactccaggtaaaggtggtacaactcaccttgacttaccagtattcaacacaatgaaagaagctgtacgtgaaacaaatgcagatgcatctgtaatctatgtaccagctccattcgttttagactcaatcgttgaagcggttgattcaggtgttggcctaatcgttgtgatcactgaaggtgttccaacaatcgacatgcttaaagcaaaacgttatttagaaactaacggtaacggtactcgtttagttggtcctaactgcccaggcgtgatcactccgggtgaatgtaagatcggtattatgcctggtcacatccaccaaccaggccgtattggtatcatctcacgttcaggtacattgacttatgaagctgttgctcaaacaactaagcttggtttaggtcagtctacttgtatcggtatcggtggtgacccaatcccaggtatgaaccaaatcgaagctcttcaattgttccaagacgatccagatactgatgcaatcatcatgatcggtgagatcggtggtacagcggaagaagaagctgctgaattcatcaaatctaacgtgactaaacctgtagtaggttacatcgctggtgtaactgcacctaaaggtaagcgtatgggtcacgctggtgcgatcatttctggtggtcaaggtactgctgaagagaaattcgctgcatttgaaaaagcaggtatggcttacactcgtagcccagctgagcttggttcaactatgttgcaagtattaaaagagaaaggtttagcttaattgcttccttgaatctttaaaaaataccgcatctgaaaaatgatgcggtatttttttgtattattgaaaagttaaataaaattgatataaggaataatttggttaaaaaagacaaaaaaatacgcaatgattggggtgatcactgcgtagaacaacgaatctgttaaaaacagtttcggcttaaggagaaatgtcgtgaggttcatatcaacctactcaagttatattagtgacgcattcttatttgttcattaaggttcacgttaattagtgttacttcacgttaaaagggtaaaagcgtgtgaatcataataaatatatagaaattctaaaaaattaaattattgaatttaaatataattataaaaaaagccccgtagggcttttttgatttatatctctaatataaaaattagaacttaaataagcctaagccatctttaacttcgtccaaagtctgctgggtaatgattcgacatttatcagtaccttggcgtaaaacatccataatgtagtcaggatctttagcaagttcttctcgacgttcacgtataggtgtaattaattcttttagtacaccttcaagacgttttttaactgtaccatcaccaagaccaccacggcggtagtgtgcttttagctcttcaacttcttctttatttggatcaaatgcatctaaataagtaaatacaatgtttccttcaacttgacccggatcttcgatgcgaagatgatttggatcggtatacatcgcatttacagcttttttgatgtctttgtcagaagcatttaaaacaatggtattgcctaatgacttagacattttcgctttaccatcaaaaccaggtaaacgagccatattagaaagcaaggctttacattcaggtaaaaggtcttgaccaatttgacggtttacacgacgcacgatttcgttagtttgctcaatcattggaatttgatcttcgcctactggtactacagtcgctttaaaagccgtaatatcagctgcctgtgctacagggtagcaaaggaaaccggcaggaatatcacgttcaaaaccacgcatttgaatttcagatttgatggttgggttacgctccaaacgagctacagttacaaagttaagatataacattgtaagctcattcagtgcaggcaagcatgactgtacacaaattgtggttttagttggatcaatgcctaccgctaaatagtctagagcaacttctaaaatgttacggcgtactttatctgggttatcggcattgtctgttaacgcttgtgcatctgctaataagagatgttgatgatggctatcctgtagacctacacgagaacgcaaagaaccgacaaaatgcccgaggtgaagttgtccggttgggcggtcgcctgtcaaaataattggacgctgatcaacattactcattatttattccactatggtattggcttaatcagggataataagccctgcaatataaaagattggcattattgtacgggaaataaaattttttcgtcagcaattgggtaaacttttcttaaaataatattgtgaatttattcagtaaaattacaaaaattgaaaaaaatcatcttacaatagtttaataaatacaaacctggataagaaatggcaagtggcttacttttactactagatgatattgcaacaattttagatgacgtcgccttaatgagcaaaatggcagcaaaaaaaactgctggtgttttaggtgatgatttggctttaaatgcacaacaggttacaggtgtccgtgctgatcgcgaattaccgattgtgtggaaagttgctaaaggctcctttgttaataagctcattttagttcctctagctttattaatcagtgtgattgctccttggttgattaatcctttattaatgcttggcgggctattcttatgttatgagggtgttgaaaaagttcttcataccattacacataaaaaagcctcaacctcagaagaagcacaaaaagagtttgatagtgaagagttagacttggcaacttttgaaaaagataaagtgaaaggagctattcgtacagactttattttgtcagctgaaattgtggttatttctttaggtactgtggcaactgcaactttaatgactaaagttagtgtcctcagcattattgcagttgtgatgacgatcggcgtttatggtttggtcggcatgattgttaagattgatgacttgggtctatatttaacaaaacaggctgcttcttttaaacaaactattggtcgagggctgcttgcatttgcgccacttttaatgaagttattgtctatcgtcggcactattgcgatgtttttggtaggtggagggattattaatcatacgattcctttactccatcatgtcactgaaaatacagttgaccatgtggaaactatacctgctgtaggcaacatcattggtgctttaaccccaacgcttattaactttgcaataggaattgttgctggtgcaatagtattgcttgttgttagcttgatacaaaaaatgtggccaaaagcttctagttaatcaggccatctacaaagaagagggaaattatgcgttggagagatcgtcgagtcagtaccaatgttgaagaccgtcgaggcggaggcggtgttagggcaggtggtattagtattattggtttggttgtggcatttgttgcatggaaattttttggcgttgacccccaacaagcatatcaggcaacgcagcaggttactgcttcgcaacaatcaaatgcaactgcacccgaaagtttaacagccgagcaaaaggaagcttctgattttgttggaacagtattagccgatacagaggatacgtggacacctatttttaaacagttaggtaaaacttatacgccaccaaaattagtcttgtttagtgggatgattcagtcaggctgtggtacagctcagtctgcaatggggcccttttattgcccagcagatcagaaggtttatatcgatacagaattcttcaaagatatgcgtgagcagatgggaatatctggcgaacaaaatcagacagaattatcgagacaagatcaggcaggggactttgcccaagcttatgtggttgcccatgaagtaggacatcatgttcaaactttgcttggtatctcatctcaagtacaacaggctcgtgcacaagtcagtcaaagagaaggtaatcagttatctgtacgtcaagaattacaagctgactgtttagcgggtatctgggccaatcataatcaacagcgtactcagtttttagagcagggggacgttgaggaggcaatggatgccgcgcaaaaaattggagatgactacttacaaaaacgagcaacaggacaagtcgttccggatagctttactcatggtagtagtgaacagcgaatgcactggttccaagtcggtttaaaaaccggtgatattagccaatgcgatacttttaataattctatctaaatctataaataagatgagtttacaaggtgtttaagtaggctcatctttttaatcatccctccaacataattaatgttaagaaatttaactaattgatagaatgattaacgtaattcgttaaacttgtattccaactttttaattgcttgggcacacatgaggtgcctattttctcgttctgttcagttctgctgtctagattttttatttggtcattgacccagaagaagggtattcatgggtaattttttcttattacaagcatttacggttgtatttgccttatcaattgcgaccaccatatttaataagcgtattttgggctttcctcaggctatcggcgtacctcttgtttctgcgatttttgtcttcattttgcaatggggagccagtcttttaaatggtaatcaattcattactatcaatattcataatattgaggaagcagtacggcacatcgatttctatgattttttaattaatggtgttatttgctttattctgacgtcttcagcacttaaatttaaaatttcagatctaagaagctattggaaacagattagtatcttagccactattgccttggtaatctgcgctgtattgtttggtagcttactttacggtttccaattgttagttggacatcatgtaccaattttggttcttctattattaggtgcagcattgggtgcaacagacccgatcggtattaaaggtgttttaagttcaattcgtgctcctcatcatctcattgttaaattagaaggagaatctttatttaacgatgcgatgtgtattgccttatttatgacattactgaatgttttacagggtgaacatttttcattggttgcgacattagaagctttgctttatgaaattgtggtagctgttggtattgggtgggcatttgggataggtaccttacgcttattgcgtggtaaacacgaaatggaatccctgattttaacaactgcattacttgcaagtggagcatatttggtggctctatttgcccatgcatctgcaccgattgcctgcgtcattggtggtttaatcgtcggtaataaatggaaagaaattcgtgaagagcgtgagatcagagaggttaaccatttttggcatacggtagaaggaattatcaattcattcttatttactttaattggccttgagttatttattcttgacttaaactttagcctgattttaggtggaatagttgctttctttattctgcatatttctcgttttgcagcaaactttatgtcttttgctttcttcccaacaatgcgtaagaccaaaagttacaatggtagtttaactattttatcttgggggggtgttcgaggagggatttcactcgctttaattttggcggtcgcgaatattccggcgctgagtccttatagtagtattctgattggatatacctttattagtgtattgttatctggtgtagtatgtggacttggccttcctgcggtaatgaatgcgttttattacaatcctaatgaagaaacggaagggcttaaaggcttttatcaaaagctatgccataaaatgaatcgccgtggctttcaatatatagttggagaagatgcattaggaagagaaacaattactatctttaacccagatgttattgttgatcaaaaaacagaagacgggattgcaaccatgcatgatccaaataagttacaagaagtaaaacgtttcgaaagtccagataatttctaaaagtaaataaaaaaataatttttatttgaatataaaaatgaggctttagtgtaatagtaaaatattatctaaggccattttttttctatatatatcattattaatatattttattttattgagatattaaaacttgttatataaaaatttaaattaaaataattttcaatgaatgttcaataataagaaactaattttgttttatatataaaacagttaataagcttgttgaataaattataagtagaaaaatcagatttttatttatataaaatttgtattaattaattttttttctttgagtactttagtatttgttttttttattttaaagtgtttaatgtaaaaatgatcacattacttaatgtttttaagttgtaggtcaaaaactcgaaaacattaagtaaaaagaattatacataaaatcatttaaatcaataatataaaaggaatatagatatgcctgagatacaaattattgccaaggataatcataaaaccttggtaaccacagagggaacttctgcaaaactttcagaagcgtcagttgtgttggtgaaagtggctgccagcgatgtattggtagtaaatagggagggtaccaatgcagtcatacgtctgaaaaatggcgagactattgttattgaaggcttctttagtggaacagctgagcctaaagataatagtctggttttccaagatgaaaatggacagttgatttgggcaaaattcaaagatgctgaaaatgatgcagatgctgatagtgatgcggacgcagatgctgacagtgacgtcgaaccacaagcacttttaggtgaagatttaccagcagctctaccagcagaagctccacaagagttggtatctgatgttatttaccagcctatttcttcaattgaacctctactttatcatgatgcaggcgtgaacccatggttatgggctgctattccactagttgcaggcggtattatcgctgcagcatcaaatcatgatagtgatgatgattcttcagcacctgttgataccactccaccaagtaccgatggcgtaactttctcggttgaccctgttacttctgataatgtgattaatgcatcagaagcatccggtaatgtcactattacaggtgttttgaaaaacattccagcagatgcggccaacacggccgttacagttgttattaatggggtaacttataatgcgactgtagataaagcagcaggtacatggacagtaagtgtaccgggcagtggcttagttgcggatgcagataagacgattgatgccaaagtaacgtttacagatgcagcaggtaacagcagcagtgttaacgatacacaaacttatacacttgataccactgcaccaaatacaccagtgattgacccagttaacgggacagacccgattacaggtacagcagaacctggttcaacagtgactgtgacttatccggacggtagtacgaaaactgttgttgcaggaccagatggtacttggactgtgccaaacccaggtttgaatgatggcgatgaagttacagctgtagcaacggaccctgctggcaatacatcaggaccaggaacagctattgttgatgcagttggtccaaatacggatggtgttaattttgctgttgattcggtaacagctgataatgtgattaatgcatcagaagcggctggcaatgtcacgattacaggtatattgaaaaacgttccttcagatgcggctgctacagccgttacaattgttattaatggggtaacttatactgcaactgtagacagtgcagcaggtacatggacagtaagtgtaccaggtagcggtttggttgctgatactgataaaacgattgatgctaaagtaaccttcactgatgcagcaggtaatagcagcacagttaacgatacacaaacttatacactggatacagctgctccttcagcgccagtaattgaccctgttaacgggacagacccgattacaggtactgcagaacctggttcaaccgtaacagtaacctatcctaatggtgacacagcaacagttgtagcaggacctgatggcagctggtcagtaccaaacccaggtttaaatgatggtgacgaagttgaggcaattgctacagatccagcaggcaacccatctttaccaggtacagctattgttgatgcagttggtccaaataccgatggcgttaacttcacggttgattcagtaacagctgacaatgtgattaatgcatcagaagcgtcaggcaacgttactgttacaggcgtattgaaaaatgttccggcagatgcagcaaatacagtggtcactgttgtgatcaatggccagacgtatactgcaactgtagatagcacagcgggcacatggacagtaagcgtaccaggtagtgacttgactgcggatgcagataagacaattgatgccaaagtaacgtttacagatgcagcaggtaatagcagcagtgttaacgatacacaaacttatacacttgataccactgcacctgatgcaccagtaattaacccggttaacgggacagatccaattacaggtactgcagagcctggttcaaccgtaacagtaacctatcctaatggtgacacagcaacagttgtagcaggacctgatggcagctggtcagtatgcaccggtgcttgatccgatcaatgcaacagacccagtgagcggtcaggcagagcctggttcaaccgtgactgtgacttatcctgatggcacaactgcaacagtggtagcaggcacagatggcagctggtcagtaccaaacccaggtaacctggtggatggcgatacagtgactgcaacagcaactgaccctgcaggcaacacttcattgccaggtacaggcacagtttcagcagacatcacagcacctgtggttgcgctggatgacgtgttgacgaatgacagcacaccagcacttactggtacagtgaacgacccgacagccactgtagttgtcaatgtggatggcgttgactatccggcagtgaacaatggtgacggcacctggacgcttgcagacaatacactttccaacactcgcagacggtccacataccattaccgtgactgcaacagatgcagcaggtaacgtaggtaacgatactgcagtggtgacagtggataccactgcaccaggcgtgagcttcacagatgcatctaccaatgacaccactcctgcattgactggtacgattgatgatcctactgcgacagttgtagtgactgtggatggcgtggattacccagcagtgaacaatggtgacggtacctggacgcttgcagacaatacacttccttcattaatcgatggtccgcataccgtaagcgtaactgcaacaatacacttccaacactcgcagacggtccacacaccattaccgtgactgcaacagatgcagcaggtaacgtaggtaacgatactgcagtggtgaccattgatactagtttgccagttgtatctttagatgatttaactactaatgacacgactcctgctttaacaggagctattgatgatccaacagcaaccgttgttgtaaatgttgatggtatcgattatccagcgactaacaatggtgatggtacttggacgctcgcagataatactttgcctgcattaatagatggtccacatacagtggctgtaactgcaactgatccagctggtaatacggctacagatacagctacgcttactattgatacagtccctgcagacctgatcggtgcgatcacgattcctgaagacctaaatggcgacggtatcttgaatgcagacgagttaggcacagacggcagcttcaatgcacaagtggcgttgggaccggatgcgcttgacggcacagtggtgaatgtcaatggtgtgaactacaccgtgactgcagctgaccttgcaaacggctatatcacagcagcgattcctgtgacaggcgaaagccctgtagcgatccatgcagaagcagtggatgcacaaggtaacgtagatgttgcagatgcagacgtgacagtaacggttgatacagttcctgcagacctgatcggtgcgatcacgattcctgaagacctaaatggcgacggtatcttgaatgcagacgagttaggcacagatggcagcttcaatgcacaagtggcgttgggaccggatgcgcttgacggcacagtggtgaatgtcaatggtgtgaactacaccgtgactgcagctgaccttgcaaacggctatatcacagcagcgattcctgtgacaggcgaaggccctgtagcgatccatgcagaagcagtgggatgcacaaggtaacgtagatgttgcagatgcagacgtgacagtaacggttgatacagttcctgcagacctgatcggtgcgatcacgattcctgaagacctaaatggcgacggtatcttgaatgcagacgagttaggtacagatggggcagcttcaatgcacaagtggcgttgggaccagatgcgcttgacggcacagtggtgaatgtcaatggtgtgaactacaccgtgactgcagctgaccttgcaaacggctatatcacagcagcgattcctgtgacaggcgaaggccctgtagcgatccatgcagaagcagtggatgcacaaggtaacgtagatgttgcagatgcagacgtgacagtaacggttgatacagtccctgcagacctgatcggtgcgatcacgattcctgaagacctaaatggcgacggtatcttgaatgcagacgagttaggcacagatggcagcttcaatgcacaagtggcgttgggaccggatgcgcttgacggcacagtggtgaatgtcaatggtgtgaactacaccgtgactgcagctgaccttgcaacggctatatcacagcagcgattcctgtgacaggcgaaggccctgtagcgatccatgcagaagcagtggatgcacaaggtaacgtagatgttgcagatgcagacgtgacagtaacggttgatacagtccctgcagacctgatcggtgcgatcacgattcctgaagacctaaatggcgacggtatcttgaatgcagacgagttaggtacagatcagcttcaatgcacaaagtggcattaggaccggatgcagttgatggcacagtggtgaatgttaacggtactaactacaccgtgacagcactgaccttgcaaacggctatatcacagcaactctggatgcaacagcagccgatcctgtgactggtcagattgtgatccatgcagaagcagtgatgcacaaggtaacgtagatgttgctgacgcagatgtaaccttaaccattgatacaactccacaagacctgattacagcaattacggttcctgaagacctaaatggcgacggtatcttgaatgctgcagaacttggtacagatggcagcttcaatgcacaagtggcattaggaccggatgcagttgatggcacagtggtgaatgttaacggtactaactacaccgtgacagcgctgaccttgcaaacggctatatcacagcaactctggatgcaacagcagccgatcctgtgactggtcagattgtgatccatgcagaagcagtggatgcacaaggtaacgtagatgttgctgatgcagatgtaaccttaaccattgatacaactccacaagacctgattacagcaattacggttcctgaagacttaaatggcgacggtatcctgaatgctgcagaacttggtacagacggtacattcaatgcacaagtggcattaggaccggatgcagttgatggcacagtggtgaatgttaacggtactaactacaccgtgacagcagctgatattaccaacggctacatcaccgcaattcttgctgcaacagcagccgatcctgtgactggtcagatagtgattcatgctgaggctgtagacgcacaaggtaacgtagatgttgctgatgcagatgtaaccttaaccattgatacaactccacaagacctgattacagcaattacggttcctgaagacttaaatggcgacggtatcctgaatgctgcagaacttggtacagacggtacattcaatgcacaagtggcattaggaccggatgcaatcgatggcacagtggtgaatgttaacggtactaactacaccgtgacagcagctgatattaccaacggctacatcaccgcaattcttgctgcaacagcagccgatcctgtgactggtcagattgtgatccatgctgaggctgtagatgcgcaaggtaacgtagatgttgctgatgcagatgtaacagtaacactcgatgtcactccacctgatatcactacaacagtattagcaattgaccctgttaccgcagacaatattcttgatgcgacagaagctggtggaacagtaactttaactggtacattgaccaacgttcctgcagatgcaacaaccacaggtgtagtggtgactataaatggtaatgactacacagcaacagtagatgctatagcgggtacttggacagttaatgttgcgggcaatgaccttgctctagatccagacttaactgttgatgctaaagcgactttcacagatctcgctggaaacagtagtactctacaagatacacaaacttatactcttgcaggttctatcactgcctttgacaacactgatcatgcagttcttagtccgaaaccagcgcttgttggtgatgatgtaagtctaggtagtacttcttatttagtacttacatctgtagcaggcttagaccttcaacttggtggtaattctctaggatttactgtcgatgctggccatgaaggtgatgttactttccaatatagtggcttaatcgacgcagctgtactttctgattacaagttagtagttcagaagttcaatacaacaactaaccaatgggaatctatacatggtgatgctaattcatcattaattagcttgcacttgttaggtattggtacaggaaatgttcctggtgcagtccttgatggtttagatgcgggtcaataccgtgccttcttagcctacgacggactgttaggattgggcgtgttaggcactctttctgccactatggatgattatgatttgtctgtagcaggtggatatgaaattggtaatgctgaaggtaacgtgattactgatccagatccaacaacaggtcaagtcgatcaggtaactgcaaatacttatgtttcatcagtgaatggtcatccgattgatgctgatggagagacatttgcaggtacttacggaacaattactttctatcaagatggtagttatgtgtatgtaccaaatgcagatggttctggtgtaggtcaaactgatgtattcacatatacgttaactgactcagtaactggagcaacaggtcaagctaatcttaatatcgtgtttgattcgattcgtgcagcggataaccttgttgaggttgaactcaatccacaatatcaattggtgggtacagagactgattcagcattctatggcgttctattgaatgttggaaatattgttgacctacaactcctcacagtagatacggttgactttactatcggtgctggtcaggaaggggttgcaacatttaacttcaatagcttgattggtgcatctgctttaggtgactacaatgttgtgttgcaaaaatacaatgatgtgacaggacaatgggaagcagtgaatggtacaggtgatcgttcattactgaacttgaccttgcttggtaatacgccaactgcgcaaataggcgggcttacagagggtgaatatagagcattcttatcattcaatggcttggtaggcggagcagtagctgtaacattaaacggcagtgtagatgtctataacccagcggttattactggttacgatgtcgtagcagctcatggcaacctaatctctgatccaaatacgaatggtgatgttgatatcgctacacctaacagtattatcagtgaagtcaatggtgttgcagtaagtgcatctccaactgagattattggtactcacggtactttactcatctatgcaaatggtgattatacctatacgccaaatgctgatagtgctggattaggtcaggttgatcaatttacttataccttgttagacccagcttctaatataacttcacaagctacgttctatgtacatctagatagtaaagttgtggatatgaattgggatgcagctgatccatcacaacctgctactgtaacgattacagcagtggatgacgctgtaaatgctgcaattgctgctgagcctcatctcatcgaagatgacagagcattgggtagtgcaacttatcttgcattgttatcgttggctggcatcaacctacaagctcctttaccattcgtgaatagtactgtggagttcaatgtaggtgctggtgaaactggaaccgcaacctttaaatacagcagtttaattaatgaaggagcactcggtgattaccaacttgtagtacagaaattcaatactgctacaaatcgttgggaatcaattaccggtagcagtgaagcttctttactgaacttaagtgtattgggtataggtgtgaatgcgacaccgggagtggttgttgaagggcttgacgaaggtcaataccgtgcctttatgacatacaacggcctctatggtaagagtatcctaggtacattgtcaggtacgatggatgtttacgatccaaaccaaattgactttactggtttggcatctgaaggcaatgtcattactggtcttggcgtaggtacaaatgctgatgctgtaactggatacacaattgttgattcagttactgtaaacggtgtgactacgaatgttgatccaaatactggaacaattattcagggtcaatacggtacgcttcaaatattcgcgaatggtgattacatctatacgccgaataatacgaatgccaacctcggtctagtcgatcacttcacttatacgttggctgatcctttgggcggcaatataagtgcaagtctagacttcactattggcaacagtacgccagtgattgccgtagacgaccttgctgtagctgttgttaatccagaatatctgcaaattggtaacgatgttgcggtagatagctacctatatgtggcgttattaagcttaactgacaattttgacttccagttgggtggacaaggtgttgactttactttgaccgatagcaccttaaatgatgtgaccttcaattacagtgcattaatagatgcaagtctgcttgctgattatgtactcgtggttcagaaatttgatactgcaaccaatcaatgggtagctgtaaatggcactggagaagcggacttactcagtctggcagcctttggtggaaattcagtgacattggaaggtctagctgctggtcaatatagagcctatatgacttatgctggtagtggtgttggcgttagcttattaggtacattgtcagttcagaaagatgtatttgatgcgacaaatatcacaggttatagcactcaagttgcagaaggtaatgttattcatgatgtcggcttaaatggacacgcagatactgcttctggttttagcacagtaactagcgttgaatttaacggcacagcatttgctgttaatgcgacaggtgtcacaaccattgtcggtgaccacggtacattgtcaatttatgctaatggtaactacagctatcagccaaatggtgaggctgcaagccttggtcaagttgatcaatttacttacaccttgtcagatggtctaaatacatcgcaagcgaccttgtatctccatattgatagcgatgcagtcgatatgacttggaatacaagtgatccatcacaacctgctgtcatcacagttactcctgtagacgcgattgataacgttgtttctgctggtgtagatatcgttcctcaaggcgagcttggtgtagctgtaggttctgcaacttatctagcattggtgggcattacagaggacttaaatgtttccttgttaggaacaccaagtgttgcatttacaattgatgctggacacgaagctgatgtgacattcgcatatgctccagtgctttcattatcattgtttaatgactataaagttgtattacagcaaaaaggtgctgatggtgcttggcataatattgacggcggctcaagtactggcttactcaatattggtttactaggtaacggtggaattggtgttactgttccagatctaggccaaggtgaataccgtgcatttatggtttacaccggtttaggagtaggtatcctaggtacaatgagtgtagtgaaagatgactttgattacacagttgcgcctaccaatacagcggttgttgcagatggtaatgtattgactgatgacgtaactacgttaactactcaagttaccactgtgacatctgaagtagtgggtgctctaccacaaactgtcggaacagatacagttataaacggtgcatacggtacattggtgatttctacaaatggtcactacacctatacaccaaatacaactgatctgagcgcgattggtaaagtggattcattcacttatacaattcgtgatgtattaacaggggcaacagatacagcgacattacatgttcaggttggttcaccagacgtaacgatcgcatgggatgctgctaacccagcaaatgatggcgtagtacaattaactgctaatcctgatcatgtggttacaactacagacttctcaaatgctgctgatctaccagtagatgtggcgagccctgtggtttctgtaaacctcatcggttctaattcagtagtgtctgatcagtttgtagtaggagctggaactgttgctaatattgatctatcagcggtttatacagcacaacctttagcaagtgtactaccgacagtaagttatgtgatccaaagctggaatggtacagcatgggtgaatacaatttactcaggttctcaaactgctctaggaagtgtggcaactattcaagcgggtagtgttgcattccaagacactgttgagcatttagctgcaggtacctaccgcgtacaatatacgctaacaggtgtttcacttggtgcgacttcactagatacaaatgtttctacaacgacagttcatctagatacttatcgttcagattggatcagcggaaatgtgttggcaggagacaacattggtggagtagcggatacaggcatcttgtctcatgaaggagctaaactccaagtttgggataatgcacaaaatgcttatgttgatgcagttggacaaacaatcaataccggtaacggtgtattgattatgcaatcaaatggtgaatatgagtaccgtccaaatgatgtgactacaaccacacaattggcgtctactgacagtattaactataagattgtgtccgtaactggtggagttgaatctcaatcaaccttaacgattgatttaacacatactgattacaatcttctttacacaagtacttctgcgaatgacacattcacaacaggtacgggttcagatactgtgatttatcaattgttgaatggaactgctgctacagctaacaatggtgcaaatacaggtggtaacggtgtagatacttggactgacttccatgttggtaatgttgctacagacaaacaagctgatctgattgatatcagagccttgttagatggagatcaaacagatgctaatattggacaatatctgaatgtcactacaagtggtggtaacactacaattcagattgaccgtgatggattatcaggactcatcccaggtaataacttcactacattgttagtcttacaaggtgttactacaacagagactgaattacttaacaatggtcaaattctctattaatagataattgaatcatcagaaaaagagaaccctagggttctctttttttatttttaaacaatactttaacctagctttgaaagagttcatgctatgatgcattgagaattttatagaacaacaaataacggatagggacttaattcgagtggcggtatttttagacttcaaaagacagctcaagctttggttagaacatattgttcaccatgtttcagaccttcaagaagaaactattttatttatatcatttggccctaaagatcacagatgtagcgtatggcatagtgaaaaaacagtgcttacacaagcaactctacaattatttgattttattgatgatcagttttcgccagatcaacttccagactacataaaaattgatgttgcgtacaatttagaaaagcaaagttggaaccaaatagagcagcaggttcatcaccaatttcacaataatcattaccgcagaggtattggatttgatgattcctgttcgttagcttttctggagcaagaaatatatggaaaagccattattcggggcttaagttatgacaagccgaacttttttgatgaaacaaatctgaactatgcaattaaacaaaaatatcgtgcaacaaagccggaaattaaacttaagtcactacaagaagtgtggactttcgatacctatgcaactttttatgaaaatggacaatttattaatttagcgagtcgctacgatgcaaatggtattagagccattgctagcaataaaaaacagcactttagagacctcattgaaaaaaatgcagcgtttttacatagccagattcaagaaaatggcaaattcatttatggatattttcctgcttatgatcgtgatatacggaactataatacggtacgtcactgtacttcgctttacgcgcttttagagacttttgaagtacaagataaacctgaatattggcctaaaattgttgcagcaattcaatacgcacttactactttctataaagaaaaagacccaataactgcgtttatgattgatggtaaagaaggggagctagaaattaaattaggtgcaaatgccgcagctattttaatgttaacgaaatatcaagaaatcacaggaaaagatgattatttaaaatatgcagagaaacttgctcatggtattttagaattagtggatccggatggattaactactcatgtattaaattatccaaattatgatttaaaagaaaagttcagaatcatttattatgatggagaagcagcattagctttattaaggttatatcaaattaatcaggataaaagattattagacacagttaagttaatgtttgaaaattttattcataaaagatatgaaaaatatcatgatcactggttaagttattgtaccaatgagcttacaaaaatatgccctgaagaaaaatattttatttttggtttaaataattatttaaaacattttatttttattcgaaatagaaaaacaacatatgccactttattagaaatgctaatggcagcctataaaatggtaaatcgtttaaaagagcaaggccataatgcactttttgaacaagcatatatgtctgagttaaaaaaactcattacatttcgagccgaatttcaaaccacaggttttttctatccagaaatagccatgtatatggctcgaccagataaaatattgcatgctttttatgtacggcatgatcgctttagagtaagaattgatgatcaggaacacaacctttctggttatattgcctacgtaaaagatttcgaaggaggggagatatgacttaccctctatttgaaattaagctgctaaccgctcttgatcatgctcaatttgaagaggcaatttgggcatttgaaattgatggagacatttctacattattactgattgattatgcattagaacaattccatcaaaaaaaagttcaagctgatgaagtctatcgggttcctgaacaaaaaattaagaaaattggtgaacaaaatttaggtctagaaaaaaatgaatcatatacatttgctgagctcttacaattcttaatttttactcaggcaaatgatgttaaagatgccttaagcaatatgctgtttggctctattgagcaaacacaattaatcttgtttaaaagagcagaagattaccagttagctttaagagcacctaatcaattaaaaaatctatttttgttggtaaaacacatttatagctatccagccgagctgaaaaaacttttctttattagaacactttcttttaaaaataaagtatatcaaccgattacgcctttgcttgctcatccggtactcacttcggttttatatatctcacatacctttagacagatttatatcacttattccgaacataaccggagcattggttttttctcttttctggatgatattcaccgtctggagcatatggttccttactaccattattttcaagaagggcatgtcgaggccaaaaaatattcttctcaaacaggcattatcaatattcttggagatacctattttggtgaaatgtataccgaaaagcgtaagtctagagggcaaacagatgccttacagcaatatgggtatcattattcatttgaaaaaatacagccctttttaggtaaaaatgacatcaacatcgctaactttgaagcagtattttctttagaaaatcaatcgccgttaaaagataaaaagccatttgttctaaaagcagatgctaaaaaaacattagaagaatttaagagtattcatctaaattatttggttttagcaaataaccatttgaaagattacggtgagcaaggattagcctatacattacatcagttggatcaggcgagtatttcttatattggcgctggactgaaccaaaaagatgctcacaattactttgaaatcacttttgagactaagcactatgcgatttttaatggttattggcatagagacacggcttatctggattatgacttttatgcgttaggatcaagaagtggagtagcttgcttaaatggcgttttacttgaacaaataatgcgttataagcaggctcatccagaacgcaaaattattgttatttgtcattggggtgtcgactttaagcctattacaaaagaccaaactaaactcgcgactattcttactcaagcaggagcggatctgatcgttggtcatggtgctcatactattcaaccaatccagatcatcaatcaaaagcctgttgtttttaatataggcaatgcagtctttaatagtgacggtgaatatgaacagcaaaatgctttgccatttggctgtatagctagacttgatttagcaaaagatatcattcgcctttaccccatttacaccaataatttacaaacattttggcagccttatcctgtagatgctgaagacttctcaaaggccagtatttatatgacatctttactgacccctgagaattacatggcatcccaagataaattagggagatatcttgaagttaaattttaaggatattggttgtaagtcgataaaatggtttgcagttgtactggagtaaaccctaaatttcttaagccaccactgcctaatttacattcggcacttgtcataatattggttggagtacgttttgtagccttcggtgcacaaacatgttttagaccaaatacatgccccatctcatgcacactaccagcctgaatattataatttagacggttccaatctaataaaataaaaggtttgccattattacgaaatgctctgcttgttacatcttcaaatttccattttgttgagtaggcatcataaataaagacaatgacttctttacttgcagtgcgcttaggaaaacatgtatttacactggcaggaatagtttcagtagaaatgggataaggctgattaatttgctgtttcaaatcacaatgtaactttgagaactcttcataagggatataacggtgtaatttaaatttgaaaatcttattatttttatcatctacataatatttatttaaaatcttaatttccttacgcatttgttgataattatcaaattttgtagcctgaggagtattggtagtaaaaacaaaagtgacgggaacaataggccgaccatctgcagatatacttggacctctttctgaaagcagagggggacgagtagtacaagaaacacacagtaaagttccactgatcaacagcaatatttttttcatgcgattttcccttgagctcatcttagagtaggtttaattttattcaaaaatttttatatgatatgaataatgtcaacgtttatggattccattttgacaactcagtatgaactacatcgacaaattttagaagtcatcgctttgattccatatggaaaagttgcaacttatggccaagttgctcgtatggcaggtttacctaaacatgccagattagttgggtatgtgcttaaacatcttgaggcagatcatcaggtcccttggcaccgtgttattaattcgcaaggtaaaattagcctaagtaagtttaatgaaaagggcgaaaatattcagcagttaaagcttgaaacagagggaatctatttattaaatggcaaagtaaacttaaagcaatttgcttggcagccttaaaagtattttaataattgcctgccttgctgtattaagctagacaggctttttagttttaacgaactattaaaaccgggatatgactttcacctaagaccttttgcgcaacacttcctaatacaagttttcgtacacctgtgcggccatgagaacccatcacaatcagatcagcattaagctcttgtgcagcttgaataatttcttcgtgaacaacaaaaccttcaagtaatttggtttctacactaagtccttcttgcaaaaattgttgcttagcttgctctaaaatatctagcaaatatgttctagtacgctcaatcaattcattggtttgccccgtcttaacgtaaaggtcagcaataatcgggtcaagtgccataacttgtacaaccgtaattttactgtttaatgctttcccaattttgattgcttccttcatagcaaccatagaagtttcagaaccgtcaattggtacaagaatatgttgatataacatgagtttattccttattgtaatgatggttatttattcaatactttatacttcttttcttacgatttaaattcgagcacgtaatcatttgtgttttttaagcaagaaattcttgcaaatatattttattcgctctgtaattttttaagatgtgctgttaatgcatctatatcatccgtttgtaaatattcccgcatttttaaaacttgtttttcatctaaatcataaatttttaaagcaagtagtttttctatttgctcctgaggaaaacggtatttaataatttttgcaggtacgccaccaacaattgtataaggggggacatctttagtgaccacagctccagttgcaacaacagcaccttcaccgatttttacaccttgcataatcattgcacgacttccaatccagcagccatctgcaattatagtgtcaccagcggctaaaaaacttcgggtgtcaaaggggaatgtcgatatccagtctggccgatgaagttggttaccacccatcataatcacgcattcagcgccaaaacaaacaaaattaccaatatagagctgatcaattggcttgtctggagtagaaggcttgtcatgtagatatcgcactacacagcgttcaaaaccttgatcccaatatgccgagtagtaagagtaattccctttaatatggatatttggatttttcacagttttggaaataaactcaaattcacaccaatggcggactggtgtgttaattagaggagtatccataatttattatccaaacaaaaatgagccaaaccatattaaataaaaacccctcataaagaggggttcaagtgtattaccttagaggtattctacacttacaacttcgtattccacttcgccttgaggagtggtaatttttacttcatcaccttcatttttacccaaaaggccacgtgcaattggcgaatttactgaaattttattgattttaaaatcagcttcatcatcaccaacaatcttataagtcttgcgttcttcagtatcaaggttttcaatcgttaccgtaacaccgaatacaacacgaccgttttgttctaagtctttaacatcgatgacttgtgcagcacccaatttcccttcgatatcttggatacggccttcacagaaaccttgctgttcacgagcagcatgatattctgcattttcttttaagtccccatgttcacgtgcttcagcaatcgcttgagtaatacgtggacgttcaacagttttcagatgttgtaattctttctctaaggcgattttaccttcaggggtcattggataacgttgcatttcggtccctcttaagttgagaaaacacagttaaaaaaatgaaaaaatcccgccaccgataaggtggcgggacttatcggaaaaaaattaacctacagttaaatcttgcaagcggtatacatccattggcaatttcacagcaaaggcttggcaaaccgcttctgcgccattgatagtcgttgtgtaatacactttgccttgtagggcagcacgacgaatcattgcagagtcatattgagcttgtttgccttcagtagtattgacaataaggtgtatttcaccatttttcaagcggtcaacaatatgtggacggccttcagttactttatttacagattcacattctaaacctgcttctttaagtacctgatatgttccacctgttgctacaagtttgaagccatattcaactaatttcttagcaatatcagcgatgtatttcttgtctgactcacgaacagataagaaagcatgctttacttcaccttcagttggcaagcctggtaagcggtcatttgagcctaaaacagccttatagaatgcttcaccaaaggtttgaccaacacccattacttcacctgtagatttcatctcagggccaagcattgggtctacgccagggaattttgcaaatgggaatactgcttcttttactgcgaaacgatttggaataatttctttagtaaaaccttgagactcaagtgattgacccgccatacaacgagcagctacttttgctaaagattcaccaatacatttcgatacgaatggaacagtacgtgatgcacgtgggtttacttcaagaacgtaaatatcgttgcctttcactgcgaactgaacgttcattaaaccaactacaccaagttcttttgccatcgcaattgtttgacgacgcatctcatcctgaatctctttagaaagagagtaaggagggatagaacatgcagagtcacctgagtgaatacctgcttgttcgatgtgttgcataataccgccaatcacgacatctttaccgtcagatacgcagtcaacatcaacttcagttgcgtcatcaaggaagtggtcaagaagaacaggtgcttcattagaagcctgtactgcttcacgaagataacgtttaagctcatcttcgttatagacgatttccattgcacggccacctaatacataagatgggcgaacaactaatggatagccaactttcgcagcttcagaaataccttcttcagcagattttacaatgctgttgtttggttgacgaagctgtaaacgttgaatcatttgttggaaacgttcacggtcttctgcacggtcaattgcatctggagatgtaccgataattggagtaccagcttcttctaaagcacgtgccaatttaagtggagtttgaccaccatactgtacgattacgcctttaggcttctctgtacgtacgatttcaagtacatcttcaagtgttacaggttcgaagtatagacgatcagatgtgtcatagtcggtagaaacagtttcagggttacagttcaccatgattgtttcataaccgtcttcacgcattgctaaagcagcgtgtacacagcagtagtcaaattcgataccttgaccaatacggtttggaccaccaccaataaccatgatcttgtcacgatttgatgggttagcttcacactcttcatcgtaagtcgagtacatatatgctgtaccagattcaaactcggcagcacatgtatcaacacgtttgtaaacagggtaaacacccaagttccaacgttgcttacggaattgcttttgagaaatacccatgaggttcgcaatacgaaggtcagataaacctttacgtttgaacgaacggatattttcagcagtgagatcaccaaaacctaaagtttttacttgagcttctgtgttgacaatatcttgaatttggatcaagaaccaacggtcaattttagttgcttcaaatacatcatctaaagagaagccgtgacggaatgcatctgctacgtaccaaatacgttcaggtcccggaactttaagctcttttagaatagtttcttttacatttgttgcaccagcttcgactttctcatcgaaaccgcttacgccaacttcaagaccacgtaatgctttttgtacagattcctggaagttacgaccaatagccatgacttcaccaacagatttcatctgagtggttaatacaggttctgcttgtgggaatttctcgaagttaaaacgaggaatctttgttacaacgtagtcaattgatggttcaaagcttgcaggagttacgccaccagtgatgtcatttttcaattcatcaagggtgtaaccaacagcaagtttggctgcgatttttgcaattgggaaaccagttgctttagacgcaagcgcagaagaacgagatacacgtgggttcatctcgatcacaaccatacggccgtctttcgggttaataccgaactgaacgttagaaccacctgtctcaacaccaatttcacgaagaactgcaactgaagcattacgcatcaattgatattctttgtcagttaaggtttgagccggtgctacagtgattgagtcacctgtgtgaacgcccattgggtcgaagttttcgatcgcacatacgataatacagttgtcgtttttgtcacgaacaacttccatttcgtattctttccagccaattaaagattcatcgatcaataattggtgagtaggagagaggtcgaaaccacgttcacaaatctctaggaattcttcgcggttatatgcaataccaccgcctgaaccacccatagtgaatgacggacggataattactgggaaaccaaagcgagattgaatttccaatgcttcttccattgtttcagcaatggcagcttttggacattccaagccgattttgcgcattgcttcatcaaacaatttacggtcttcagctttttcaattgcttcttttgttgcaccaataagttctacgccgtatttttctaatacgccattttcatcaagtgcaagtgcgcagttaagagcagtttgtccacccatagtagggagtactgcatctgggcgctctttttcaatgatttgagcaacagtttgccaagtaattggctcaatataagttgcatcagccattgaagggtcagtcataatggttgctgggttagagttaaccaaaataacacgatagccttcttcacgaagtgctttacatgcttgagcaccagaatagtcaaactcacaagcttgaccaatgacaattggaccagcaccaataattaagatgcttttaatatccgtacgtttaggcattattcgctccttaattactgtttagatgcttcaataagttcgatgaaatgatcgaacaaaggtgcacagtcatgtggacctgggcttgcttcagggtgaccttggaagctgaaagctggtttgtctgtacgatgaatcccttgtagagtgccatcgaacaatgatttatgcgttgcttttaagttagccggtaatgtttctgcatctacagcaaaaccatggttttgagatgtaatcatcactgtaccatcttcaagattttgtacagggtggttcgcaccgtggtgaccatgattcatttttacagtttttgcaccagaagcgagtgccaagatttgatgtcctaaacagataccaaatacaggtaatgttgtggtttcaacaatagtttttacagcttcgatagcgtaatcacaagcagctgggtcgccagggccgtttgaaaggaatacgccatccggattaagtgctaatactttttcagccggagtttcagcagggacaacagtgagtttacaaccgcggtctgcaagcatacgcaagatgttggttttgacaccataatcgtatgcaaccacatggtattttaactcaggttgagtaaagcctttacctaatacccacgaaccttcagaccattcaaagcctgtcgggtcacagcactcttttgcaaggtctaaaccatttaaaccaccaaaagcgcgagctttagcaatagcttcttcttcagtaatattttcgccggcaaggatgcaaccattttgtgcacctttatcacgtaaaatacgagtaagtttacgtgtgtcaatatcagcaattgcgacaacattgtgcgcttgcaaatattcacttaatgattgctcagaacggaagttgctgtgtaatagtggaaggtcacgaataattaaaccattcgcccatactttatggatacgaccagattcaacgtcttcttcgttgcaaccagtgttaccaatatgagggtaagttaatgtcacaatttgttgtgcataacttgggtcagtcaaaatttcttgatagcctgtcatggctgtgttaaaaacgacttctccagtcgtacttcccgttgcgccgattgacgttcctttaaagatcgttccatctgcgagggctaaaatggcgggggtgctcaaaccaaagctcctgaatttcggctgtaaaaaagcgagtagacctaaaaaagataggcgatgttctaaaaaaacatgcccctcctcactggtctgctcgcttgtaacttaacagcgcattatacgcatggaaccttaaaaagtctatttattttctattaaaaaatttaattcattgcttgcttttagcaaaaaaattcatccacttgtctgaaattgatacttttagcaaattgtctgacaatctggctgctgaaattgtctaattcctcttattgtaatgttagctaaaaaataaacaatacgaggaaatagcatgagcgataaccaagtttcaaaagacatagctgagaatacttcatcagtagcagagactgtaaaaacagaagtagctgaagctaaagaggccgtagccaaaacgacgactcgagctaaaaaagcggttagcactaaagctacacaggtaaaagaagttgtagctgaaaaaacagaacaggtcaaagaagtcgctcacgaagcgacttcgcaagttaaagaagctattgcagaaacacaagagcaagtaaaagctgtaattaatgagaccgaagaaaagattgaagctgaaacacaagaattgaatcagaacattcacaatcaatttgctcagattaaacaagatattttacagcgtcttgatgtgattaaagctcagttcaatacttcacaagaaggattgaatgaattaaaaaatactttaaaagctgaaatcaatgcattaattgaagatctaaccaaagtgactaaggaacttaaaggtgacattagccaaatttctttaaaacacaaagactctttaactgaaagcttaaaacgcactaaaaataatgcggttgaagcttggaacaaagcaagagatcactaaagatttagcattaaaagttaataaaaaaagcgagaattaatttctcgcttttttgttttttaaaactcatgcagccaatcacgtttattgtgaaaatcagcatgttttccactatgctgcattgcatagtactgcataccatcttttgtttttaaaacagcagtcaaacctagataaaggtttgcccattttaagcggtgctgttgcataaactggcttaagtcaagacttacatttaacccatagtgggtacgtttgagatgattcaattcgatatcgtaagcaacgaggggaggcatgctttccggatagcgatattcttcaaactggtaagtctgccatgcttgagaaggggaaagattaatttcccggtagaaatcttcatcatgcacgccaatgaaaatttcaaaacaagtctcttcccacaaaaagtcctggcgaggatgagctgcgacttcttggggccagataattagttggtttggatcacgaatccaaaaacccacatttaatgtatatggggcttgctgttcaattgcgccaacaacagaaacagcatgaaaacgatcaaaagctgaaagttcgtaacttgccataagtagtcaataagttagtttgctaagtgtgcgtgacgaacaaggttagataaatgttgattttgcttagctgcttttttatagagtaaaacaattttaccaattttctgtacagcttcagcaccagttgcttctacaatcgcatcaattactgcggcacgagcttcacggtcttcaccagcaatttttaccttgatgagttcatgatcgtttaaagcacggagcgtttcttcaataacagcgtctgttaagccttgtccaccaatcatgacaactggattaagcacatgaccaatttgacgtaaacgtttacgttcatgaatagataaagcggccattaaaaatacctgattttaaaaacgacttagtatagcaaaaaacttaaaatcaaatgtacgaaaaactgtataaataatcgatcaacattattggaaaaaaactgtaaaagttattgagattacgttacatccgtactgtaatgagagtaattttcacgtacaatgagcaatcagaagtttttttgatatttagtgagttatggcaacacgcatcaccaaccaaaaattgtctaaaagtagtcgtgcgtggatgagggaacatctagacgatccttttgtaaaaaaagcacaaaaggaaggatatcgtgcacgagcagcgtataaacttcttgaaattcaagaaaaatataagttgatcaagccaggcatgacagtggtggacttgggagcagctcctgggagttggtcacaaatcgctgggaaactcgttggtagtaaaggattggttattgcttccgatattttacctatggatgctttgccagatgtcactttcttacaaggcgacttcagagaagaagctgtatttgaaaaattgttaaatattttaaacggaagacaagtagacattgtaatttctgatatggcccccaatacatcaggtaatagggctgttgatcaacctcgacagatttacttgtgtgaacttgctttagactttgctcagaaagtcttgggtccaaatggacagtttgttgttaaagtgttccaaggcgcaggatttgatgagtttcgtaaacaagtcgttgatagttttgatgtgttaaaaacagcaaaaccagcagcttctcgggcacgatctaaagaagtttttttggttggacaagggcgtaagaaagcattgcaataaagtttacttgccaagctcctaaaaattgtgcattttgtatcttttaggttatccgcaagcaagacaattgctgtttttaagacgatcggccaagtttgggcatgatcaaattagattgatatgggaataaagctttgagcgattacttcaagaatgccgtattgtggctaataatacttggtgttctgattttaattttcagtaatatcagtgaccgcaataagccaactgcaatgaaatattcagattttgttgcagcggtgaatgctggccaaattaagcaagtcacgattgacggtttaaatattagtggtgaaaaaactaacggatctcagtttgaaactgttcgtccgcaggttgaagacactgaacttatgccaagcttaaacaagcaaaatgttgttgtagagggcacagcaccacaacgtcaaggcattttgatgcaacttctcattgctagtttccctgtactgttaatcattttgttattcatgttctttatgcgtaacatgggtggtggtgcaggcggcaaaaatggtccgatgagttttggtaagtcgaaggcaaaaatgctttctgaagaccaaatcaaagtgacttttgctgacgttgccggttgtgatgaagcgaaacaagaagttgtggaaattgtagatttcttaaaagatcctgcaaaattcaaacgcttgggcgctactattccacgtggcgtgcttatggttggtcctccaggtactggtaaaacgttattagccaaagcaattgctggtgaagcaaaagttccattctttagcatttctggttctgactttgttgagatgtttgtgggtgtgggtgcgtcccgtgtccgtgatatgtttgaacaagcaaaacgtcatgcgccatgtattatctttattgatgagattgacgcagtaggtcgtcaccgtggttcaggtacaggtggtggtcatgatgaacgtgagcaaaccttaaaccaaatgctcgtagagatggacggttttgaaggtaatgaaggcgtaatcgttattgctgcgactaaccgtgttgacgtattagataaagcattgttacgtccaggccgcttcgaccgtcaagttatggttggtttacctgacatccgtggtcgtgaacaaattctgaatgtacatttgaaaaaattgccttcagttactggtgtagatgttaaagttttatctcgtggtacacctggtttctctggtgctcagttggcaaaccttgtaaatgaagctgctttgtttgctgctcgccgtaataagaacactgtcgatatgcatgactttgaagatgcaaaagacaagatctatatgggtcctgaacgtaaatcaatggttctacgtgaagaagagcgtcgcgcaactgcttaccatgaagctggacatgcaattgttgctgagattttaccgggtactgaccctgtgcataaggtaacaattatgccgcgtggttgggctttaggtgtaacttggcagttacctgaacaagatcagattagccactataaagacaaaatgctaaatgaaattgcaattttgtttggtggacgtattgctgaagaagtcttcattcagcaacaatcgactggtgcttcaaatgacttcgaacgtgctacaaaaatggctcgtgcgatggtaacgaagtacggtatgtctgacaaaatgggtgtgatggtttacgaagatgaaaaccaaaatggattcttcggtaacgtaggtagccgtacaatttctgaagcgactcaacaacaagttgatcaggaagtacgccgtattttagatgaacaatataaagttgctcgtgatatcttggaaaataataaagatatcgcccatgcaatggttaaagcgttgatggaatgggaaactattgatcgtgaccaaatccgtgacatcatggaaggccgcgaacctcaaccaccgaaagtttatattgctgaaaatccggtatctgcgtttgagccgccaaaagatggtccatctactccgccgccattaccagcgatgaattaagttaattaataaagaagccacagtcatgtggcttttttatttgtcttaactttggataaagctgaaaagaaatcgacagcatgtaaagcttacttgctaaaatagccgctgattttgaaccggagctttttatgcagttaatatctttaccaaagcagattttacagtgtggacagcttcaattagatttatctcagccccatgttatgggtatcttaaatgtcactcctgattctttcagtgatggtggtaaacataaccaattagaccaagcggttgatcatgcacttagtatgattgagcaaggcgcgactattattgatattgggggggaatctacccgacctggtgcttcagaagttgtagtagaagaagaagtgcgtcgtgtggtacctgtggtcgaggctttatctcaccataacgttattttgtcgatcgacacaagtcagccagaagttattcgcgcagcaaaagcagcaggggcacatatctggaatgatgtccgtgccttaacacgtcccaatgctttaaaaactgccgtagaattagatatacctgtagtaattatgcatatgcgcggtgaaccaacgacaatgaatcagttggatcagtacactgatgtaacactcgatgtgatgcaagagttgcaacagcgtattgatgaggctttggctgctggggtaaaaaagcacaatattattgttgatcctggatttggctttgcgaaaaatgcccagcaaaatttaaaactattaaaagaattttggaaacttaatgaacttggttatccaattttatccgggctttctcgtaaacgtttcataggtgaagctttacaaggcgctcctgcagatcaacgtgctgtgggaagtgtaactgggcatttgcttagtattcagcagggagcatccattgtaagagcgcatgatgtaaaggaaatgcatgaagcaattttagtttggaaagcgatgcagcaagtctgaataatgacgttataaaattggactcactcagtgctcattaaaatagagtggatgagtgagtcgggtaaatatctcgtgatttttacgaaaatatgttataagcggcaagtttttgctgttgtgtaaacttttgtatgtttgaagacttacttctcccaatgtttgatgatgaatattatccagatattttggtcgctgaactcaagcagcttattgagcaatttgctaaaaaagttcaaaaacctgcgttagctgagcaagatatctatcgatacgctcatcaaactgtaaatgaaattaatgaaatgaagccacagttcgaagatctagactcatcgcttgatgatagtgctgctgattatattgctgaggcaatgatgatggtggtacaagatgcaggatatttggatctggaaatggaagagttggtgatgaatcgagagtggtgattactctcgattttcaaaatttttgagagcatctaataaatgacatgtctcgtctaagtgaacttcgtctattttctcaatttttaaaattaaatttccattctgctgttcatttacttctgccaacacgctgacccaatagtttttttgttgctgctgtagctctttaaattgagtaaatatctcttgaggggcttcaattagatagtcatcttgagtaatagagcagcgtacaaagtgccaatcattatttttgaacaagattgtaccgttaaatatatctttggcatttgcaaagggtataaaaaagagtagagcggatataaatattaatattctgatcatggcattattttcatcaggcataaaaaaaccagcttacgctggattctttatggcaccaaattcaatagttgaaaatggtgcccggggccggactcgaaccggcacgctttgagggcgggggattttaaatcccctgtgtctacctatttcaccacccgggcatgtgcgcaataatagaggacaagtgcgcgattggcaagagaaaaacagagagtttgctttattttcaatcagttcttatcagtatttctataaattaaccaatttatgtcatgatttgttcatcaaactgagatcagttgttcatcttctctacttaagtttaagacactcattgcttaaaacttaggtaattttatgtcagagaaaatttcacgccgagaattaattcaaaaaagtctgctcggttttggggctttatctatacctgttgcttttacaggttgtaatgatggctcagatgatgaaagcccagaaatacaagcagattttcttcatggtgtcgcaagcggggatccactacaagataaagttattttgtggacacgagtaacaccgacagactctggggtgcgcttaaaagttgtatgggaaatttcaaccgataatcagtttaaacaaaatttaaagacgggaatggttgaaacaagcaagactgatgactttacagtgaaagttgatgcagctgggttacaagcagatacggtgtactactaccgttttaaatttggtaataaagtttcaccggttgggcagacgaaaacattaccaacatccaccaataaagtgagctttgcagtatgttcttgttctaactatcctgcgggttacttttatgtttatcgtgaactggcaaaacagaatgttgatgtcattattcacttgggtgactatatttatgaatatggggcagatggctatgcgacagaagatgcaaccaagttaggccgtaatttacctgccgataataataaagaaattattaaattagatgattaccgcaaacgttatgcgctttatcgtcaagataaagatttgcaagcagctcatcagcgccatccttttattgtgatttgggatgaccatgagttggcaaatgatgcttggcgtgagggggcggaaaaccatcaaagtaatgaaggggccttttcggaccgtaaattagctgccctacaggcctattttgaatggatgccaattcgtccagtttctagtacagatcatttaaatatttatcgccagtttaattttggctctcttgttcagttaaccatgctagatacgcgtattattgcgcgtgataagcagcttgcatatacagactatatgacggctacaggcttggatattgcaaagtttcaggcagatttaactaatccggtgcgtactttgatgggatatacgcaaagagattggttggtcgataaattaaagcaatctacagcaacatggaatgtagtaggacagcaagtattaatgagtaaaatgtggattccagctgagttgttggcgtctttagggcaaattacttcaggaggaacttcgcctgaggcgcttgctaagatgaatgcacaaattaccgagttagtcgctttaaaacttcgtttacaacaaaatgatccgacattaacagcccaagaaaaagcaagaattatgatggttgcgccatataatctcgatgcttgggatggttactatgctgagcgagagtttgtgtacgataaattggcagagtttaataaaaagatcattgtgttagccggggatacacataatgcatgggcatcttatttatatagccagaaagggaaatatgttggagttgaattagcgaccagttctgtatcgtctccaggtttagaaaaatatttaagtattccactggctcagcttcaacagtttgaatttgcatttactacattaattgatgaattggtttattgtaatttaaatcaacgaggatatctgttggttactctagatcaggcgcaagttcattctgagtggagatttgtagattcaattaaaaataccgaatatcagatagattcaagccgacaaaacgatattgtattgaatctaaatttgatgccgttaaaacaaggtcaaaagactgcttgaaattatagaaaattagagggttgctgaggtaaccctttttttaggcataaaaaaaccagcttacgctggattctttatgacaccatattcagtacttgaagatggtgcccggggccggactcgaaccggcacgctttgagggcgggggattttaaatcccctgtgtctacctatttcaccacccgggctttaccaaatttggaggcggaggtcggaatcgaaccggcgtccacggagttgcagtccgctgcatgaccactctgccaccccgcctgcatttggtgatgcacatattagcaacctttacaaaaaaaacaatactgttttgagcgaagatgcacataaaaacaacatctagaataaaattgtcgaaattatcatgtattattggcacattaaattcatgtctaccttggagatgtgctgtggcattggttttagacggtcgtgcattagcaaagcaaattgaagaaaatttgttggtacgtgttgaagctttaaaagcgaaaacaggtcgtaccccaattttagcgactattttggttggggatgatggtgcttctgcaacttatgtacgtatgaaagggaatgcctgccgccgagtaggtatggattcattaaaaatcgaattaccacaagaaaccacaacagaacaattattagctgaaattgaaaagcttaatgccaatccagatgttcacggtattcttttacagcatccagttcctgcacaaattgatgagcgcgcatgttttgatgcaatctctttagcaaaagatgtagatggcgtaacttgccttggttttggccgtatggcaatgggtgaagctgcatatggttcagcgactcctgctggcattatgacgattcttaaagaaaacaatatcgaaattgctggcaaacacgcggttgtagttggtcgttcagcaattttaggtaaaccaatggcaatgatgttgttgcaagcaaatgcgacagtaacgatttgtcattcacgtacacaaaacttacctgagcttgtgaaacaagctgacattattgttggtgctgtaggtaaagctgaacttattcaaaaagattggattaaacaaggtgcagttgttgttgacgctggtttccatccacgtgatggcggtggtgtaggcgatattcaattacaaggtattgaagaagttgcttctgcttatacacctgtaccgggtggtgttggtccaatgaccattacaactttgattcgtcaaactgtagaagctgctgaaaaagctttaggttaatttaatttattcacggcggcatcctaccgtttaacgcaaatgttaggagctcgtatgttacttttctttcgggatgagtagcgaatgctacgcaagaccaaaacggttgcactaattaaagcagtggaattgaactaacgtatttttagtaactagccactatcatgctttaagctactgttttagtcttgctcgttatgcagatgatcaaatagtaattataaattgttgagcttatttatgagctgcacctttcaactgtccaaagtccctgaacatttacttcaagccttacatgaagtcattcctcattgtgaattaatggcacaacagttgccagaaactccaatttctttatggttgattccacctgtttttccaactgatcggttggatgacgaagttattcgccgtatctggaatgacacgccgtattggattttctgttgggcatcaggcttggcgatggctcagtggatacttgcagagccgcaccatgttaaagataaagtggtgttagatttcggagcaggttctggtgtagtggcaattgctgcaaaaatggcaggagcaaaacgcgtaatctgctgtgatattgatcaggtcagtttaaatgcttgccgtgaaaatgctttacttaatgatgtagaactcgaatatttggatgatttatataaggctgaacaagtcgatgttttacttgctgccgatgtgttatatgaccaatgtaatcgctttttcttagatgaatttttaaaatttgcaccagaagtttgggtagcagatagccgagttaaaaattttagtcatccaaaatatgaaaaaattgaagaaagaagtgcaacaacttggccagatctggatgaagcgaaagaatttagaaatgtaagtttttataagacgctgtaagagaacagcgcctttttttatgttatgaacaagtataacgaacgacttttaatgtacttggacgtgcttcaagtgcttggcgtgtcgcataatcttcaccattatttaagctaggtgtatttgataagccaaaagaagcgcgggtttcacctagttgaattccgtaatgctcatctttagctggattaggaatttcattgatgcttaaaattgataatttataaactttctgagcacctaacacattttgacaagcacgttgcaatttacgctcatcaagttgctggttactacgaccagctaaagtgtaagctaaagtcgctgaagtttttgtttggttttcaatctggtagccagttgaaccattatattgtcgaggcgtagtctgacatgcagttaaaatgaacatactacttaatgccaaacatagaatacttttattcatcagtatcgtccttattttcttatatgaagtatctcataaaatagaaacgttgttggagcttattcactaagttagagctaacattcacttatgatattagctctaattgaaggattttaatgttctttaatttttgaatgatgcttggtgtctttcatgaagatataaatcagcaatgaaatgaaaatcatgatactgacgtaaataaagaaccaagattcgtgcccggcttctttaaaacttaatgcaaaaaactcggctgtaccaccaaataaagtattcgcaattgcataaggtaatgcgacacctaaagctcgaatatgtgcagggaaaagttcagctttcactacagcattaattgatgtgtagccagttaccatgactagtccacctaaacataaccagaaagcagtccagtagttatgcgtgtttgcaagtgtatcaaacaaaatataagtgaataaaacacctgtaaccccgaaggcgatcataagcggtttacggccaattcgatctgataaggcacctgccaatggctgtaagcacataaagatgaataaggctaaagtggtaatttgagtagcctcaggcttggtaaaaccagaagtattcactaaatatttctgtaaataggtggtgtaagtataaaaagctaaagtaccaccagcagttaggaataatacagtgaaggcctctttaggataatgtttaaataaagcaaacattcctgatttcggctgatctgtttctgcttgagcgtttttaaaggattgagtttccaataagccacgacgaatacggaacaccacaatagctaaaagggctccgatgaaaaacggaacacgccatccccagtcatgcagttgttcttcggtgagtatcatttgcaagatgagtagtacgcataaagctgtaagctgtcctgcaattaaagtgacatattggaagcttgagaaaaaaccacgtcgatctttttctgccatttcacttaaatacgttgcacttgcgccatattcaccgcctacacttaagccttgaattaaacgtgcaataaccaaaagcaatggagcaaatacgccaatactttcgtaggaaggtgtaacagcaatcagtagcgaaccgatacacattaaagtaacggaaagcgtaaggcccgctttacgtcctttacggtcagaatagatccccataatccatgcgccaatgggacgcataaggaaacccactgcaaaaatagcggcagcttgaagaagttgagcggtttgacttccttttgggaaaaatgcatgagcaaaatagagcgtaaatgcggcatatacataccagtcgtaccattcgacaaggttaccggcagaaccgcccaaaattgattttagacgggtttttgtatctaaattagaatgtggagttgttgcggtagaaggttgatcaaccatgattcgctccatgtttcgcttgggttgaatgctaaaaaagagaagatttattccgtttttacatattatctacaggagtatttcactttattttttttatgtctgtaaaacaatgtttattatttaagcaaaggaataagttgaatatttatgtgatttcaaattagccgatcagcatatttttatcttctaatttcaatatttttcttattacttttttccatgcagtaaaaaattgataaagaatgggtaatgtttggacgaagaaaccctataccacttaaaaataatgatatattccaaagaaaattttaaataaatacagttaggcatgatgtttttgcattgtgggctagatgtgtgtggaaaatgaaagggacattcagatgtcaaattgcccgaaaaaatatattgtcgcttttgatcagggaacaacaagctcaagagcaattgttttagatcatgatgcgaacgttgtcagtattgctcaaagagaatttacccagatttaccctcagccaggttgggttgagcatgatcctatggaaatttgggcaactcaaagtgctgtatgggtcgaagcattggctcaagctggcatcaagagtgaacaagttgcggcaattggaattacaaaccaacgggaaaccactattgtctgggacaaaaaaacaggaagacctatttacaatgcgattgtttggcaaagccgacaaacaacggaaatatgcaatcaattgtataaagcaggttggcaagaatatatccgtaagaccactggtttagtcattgatccatatttctcggccacaaaaattaaatggattttggatcatgttgaaggcagccgtgagcgtgctgaacgaggagagctattattcggtacggtggacacttggctgatttggaaactaactaatggggccgtccatgtcactgattttaccaatgcatctcgaaccatgctgtttgatatcgaaaagcttgagtgggatgaaaagcttttacaagctttagacattcctagagcaatgttgccggaggttcgtagttcatctgaggtttatggatatacacataccattagtggacaagaagtaggaatcccaattgccggaatcgcgggtgatcagcaggctgcgctttttggtcaaatgtgtgttgagtcgggacaggctaaaaatacctacggtactggctgttttctactcatgaatacgggtaaaaagattgtccgttcagagcatggattactcacaactattgcctgtggtgcgagtggtgaggtgaactatgccttagagggtgccgtatttaacggtggttcttgcgtacagtggttacgtgatgaattaaaggttattaagaatgctaaggattccgagctttatgcaacacgtgtaaaggataataatggtgtatatgtagtacctgcttttaccgggttaggagcaccgtattgggacccgacagctcgcggcgcaatttttggtctgacgcgtggggctagtattgaacatattatccgcgcaactctagagtctatagcctttcaaactcgggatgttttagatgccatgcaacaagatgcagaagaagagcttcgtacactccgtgtcgatggaggagtaacggaaaataatttcttaatgcaatttcaggctgatattttagcgacaccagtagaacgtccaataatgaaagaaactactgctttgggtgcagctttccttgctgggctggcgacgggtttctggcaagatctacatgagttaagaaataaatctgccatagaaaaggtatttgagccaaaaatgtcttctgagcaatctgagatgatttataagggttggctcaaggcagttaaacgtagtcaaagttgggctgaggattagttcgttctttaactggttgaattcactagtagggtaatcaattaacggttaaacacttagttatttaaaattgattattctacttttttgattgttgtttcatcaatttgatgttttaatttttataagatcaacaataaaaagaacatgagaaatgaaagtacaacctaatgattattcaaaaatatatgatcttgccgtaattggcggtggtattaatggtgttggtattgccaatgatgcagcagggcgcggattatcggtatttttatgtgaaaaagatgatttagccagccatacctcatctgctagcagcaaattaattcatggcggcctacgttatttagaacataaagaattcaggctggtcagagaagcattagcagagcgtgaagtattgctagctaaagcgccacatattattaaaccaatgcgttttatcatgcctcatcgaccccatttacgccctgcatggctaattcgagcaggtctatttttttatgatcatttgggaaaacgagaaaaattattaggatcaaatctcatttatttcaaagaagatagccctttaaaaccagcgataacacgtggttttgaatattctgactgtactgtagatgatgcgcgtcttgtggtattaaatgcactacaagctaaagagaaaggggcgaaagtcgttacacgtacgcgttgtgttaaggcttataggcaacaggaattgtggcatctggagttacaaagcggagctgagttctatcagatacgtgcgaaagctattgtaaatgcggcgggaccttgggttgaagaaattattagtgaaaacctgagtttaagttcaccttatcaaattaggcttatacaaggaagtcatattgttgtgccaaaattatatgactgccataaggcctttattatgcaaaacgaagatcgaaggatcgtttttgcaattccttatttagaaaaatataccctcattggtacaacagatcaggaatacacaggtgatccacaaaaagtagagattactgatgtggaaatcgattaccttttgacagtgacaaattcacattttaaaaagcagttgacgcgagctgatattgtaagtcagtactcgggtgtgcgtgctttatgtgatgatgagtctgataatccatctgcaattacacgcgattatactttggctctacaggcagaagataaaactacaccattgctctcagtgtttgggggcaagattacaacttaccgaaagttagccgaagctgctttagagcatctggctccgttttttaatgacatggcagaggagtggactgcagatgagccattacctggcgccgaaaactggaccacactagatgatttaatcaatcagattaaaacacgtgtaagtggaatttctgactcacttgccaaccgttgggctcatgcatatggcacaagagtgtggaatatgcttaaagagcgaaatgctatagaacaattgggtcaacattttggccatgatttgtttgagtgtgaagtcagatatttgtgtgaatatgaatgggctcacacagcagaagatatactttggcgcagatctaaattaggtttggcatttgatgaaaaacaggtaaaagttttagaagcttatttatctgaacgtcgattaaaagacgatgccgcataataaaaaaggtcgcacatggcgaccttttttatatagagcaattagaagccagtttttacagcttcaagtaaagctgcttgacgttcttttaatgctttaggtaagcgttcgccaagtttattgaataactcagtgtggctttcaatttcagtaacccactggtctttatcttgatttgtgatgaggtcaaattgttctttagtgaactcagtaccttcccaattcaagtcttcatatgttggaacaaaaccgataggtgtttcaacagcgttcgcacgaccttcacaacgatcaatgatccactcaagaacacgcatgttttgaccgaaaccaggccatacgaagttgccttcagcatcacgacggaaccagtttacattgaagatttttggtaatttgttgccagaagcttcagctttttcacttactttcgcaccaaggtttaaccagtggtcaaagtaatcagccatattatagccagcaaatggaagcatcgcgaatgggtcacggcgaacaataccttgttgaccaacagcagcagcagtagtttcagaacccatagttgccgctttatatacaccgtcaacccagtcgaaagcttcagaaactaaaggtactgtatctgcacgacgaccaccgaagatgaatgcagaaattggaacacctgctgggttttcccaatcagcatcgatagatggacattgacctgctgcaacagtgaaacgagcatttggatgtgctgctttttcgccgtttacgtgaggttgacctttccagttagttaagtttgctggaacttctttagaaagaccttcccaccatacttgaccatcgtcagttactgctacgtttgtatagataacgtctttgtgaagagttgccatacagttcgggttagttttggtatttgtaccaggtgctacaccgaagaaaccagcttcagggttaatcgcatataagcgaccatcttcacctggtttaatccaagcaatatcgtcacctacagtttcgattttccaaccttcataacctgctggtggaattaacattgcaaagtttgttttaccacaagcagacgggaatgcagcagcgatgtagtgtttttcaccttgagggttagttacaccaagaataagcatgtgttcagctaaccaaccttgttcgcgtcccatgacagaagcgatacgaagagctaaacattttttaccaagtaacgcgttaccgccgtaaccagaaccgaaagaccagatttcgcgagtttctgggtaatgaacgatatatttctctgggttacaaggccaagcaacatctttttgaccttcagcaagtggagcacctactgtatgtacgcaaggaacaaactcgccatccgtacctaatacgtcataaactgctttacccatacgtgccattttgcgcatgctaacagctacataaggagagtcagttaactcgataccaatgtgagcaatatggctacctaaaggacccatagagaaaggaacaacgtacatggtacggcctttcattgaaccttcaaataaaccatttaatttttcacgcataacagctggatcttcccagttgtttgtcgcaccagcatcttctttattttgagagcagatgtaagtacgatcttcaacacgcgcaacgtcagatgggtcagaatttgcaagataagaaccaggatgtttttcttggtttaatttctgcatggtgccgttagcgatcatcaagtcgattagacgttgatactcttcttcgcttccgtcacaccattcgatttttgctggtttggttaagtttgcaatttcttcaacccatgctataagcttaggatgacgaacgaattctggtgcgttcactgtggtcatggtgaggcctattcaaaatatgtacaacgtacaagtcattcattgggatacaatgaaagatcaaataaaaaagtggctgtattaaagcataaaatcataaaaaaaataagactaaagactaactagcagatatttggagttttctttattttttaatgaaaatcatatgtttatatgtttttataaggtttttgcttttatatttttatgttatatgtatgttatttatctaaattattttgtttaaaatcaattaattaggcttgaaaaatttttttgagaattattattgattatacaaatgaagctcattcaaaatttacataaagagacttttaataggcgattttatatacaaaatagaataaagaactgactttacgataataaaatgcggcctttgaaacctctttcaatcatctataacgaaaaatcaggatttcatgcttcaaaacatgaagacgtctatgagcagctcatgactgtatttacagaatatggttttgaaatacaagtatttgaattaaatgaaaatacattatttgatgatttgataaataatgttattcatcgacattcacaaaatgaaaatacaggagtggttgttgcggcaggaggagacggtactttaaatgcggttgcaactaaacttaaaaatacttctattcccatgggaattctgcctttagggacttttaattatgttgctaaagttttagagattccgttagaccttttagaggcagcggaggttattgcaacaggtaaacctaggtcagtacatgtagcagttattaatgatcatatttatctaaataatgccagtttaggtttatatcctctttttatcaaaaaacgcgaactctacaataaatatttaggaagactgcctttacatgcctatacctcagctttagatgttttattgagagaaaataaatcaatgaagctttctataactgtagatggcaagaaatacccagttaaagcgccgctcattttctttggaaataaccaattgcaactatgtgatatgaagctcagaattgcagaatgtgcagcacagggaagagtcgctggagttgtaattacaaaaagtgataagctgagtttactaaatatgctttggcaatgggttcaaggtaaagttgaagatgcacaagatgtatatagtttttgtgctgatcatgtcattgttgattgtgcaaagaaaaccaaactcacagtggccttagatggagaaatcatagagatgaaacctcctttaaatttcactgtagaaaaaaatgctttaaatattatggtgccgaatgttactacatctgtctgatttacactttgggacagaaaaaaaagagtgtttagaggcaataagagatttttgtattcagcaacagcctgaagtgattgttgtgagcggcgatattactcaacgcgccaaatatgaacaattttttaaatgtcgacagtatttagatagcctcaatattccttatcttgtggtgcctggtaaccacgatatacctttgtatcatgtctggaaccgttttttttctccatttacccgttatagatatttttttggtgaattagagccgactttagaaactgaacatttttatattgttggggtgaatagtatacgtcgtcgttatcatacgcgtgggcatatttcgattgaacaaattcaagctacttatgagcgtttagacaggggacctaaaaataaaataaagctagttgtttttcatcaacccttttatacgccccctgataataagcatggaataaaagattgtccggttctgggtaaaatcgctttagaaaagtggagtacaactggtctatttggaatgttacatgggcatctccataaaacagctatatatgatttaactcagatttattctctaaaaatagatcatcctatttttgatatacatgcaggtacagcaacttctactcgcctatatcatcataatccaaatagctttaatacaatttcaaatgaaggaaaaattcagcattattggtttaattacgatttaaagatttttcaattaatttaatttataaaaattctataagacacttaacttatgagtagattgataaaattttatccattacaatgcttaagctaaaaattctatatatggggaataggaaaacattttaaatgttttatcattttaaaaaataatattaatgcataaaaagatttttactatataaaaagctgtgctttttaactagctacaatatggatttagttttttatgttctttaataatattttattaaaatgaatctctatttgacttaatattttagaaaaacttaataattatttgaaatttcatggtggaaaaatggtacaagtatcattaatggcaaataatgcttcaaaaaataatacagttgatattaatgttggccaaacaaaaaatattgtagtagatccgaaggtaatcgcaaaaattgatattaatccagaaaaaattgcttcaataacaagagatggtaatagtgcggttatccatctaaaagatgggactgaaattgttttagagaacttttttattagtgaaaatccacaaattcttttaaatgaggggcagatttattgggctgctaatttagctgaagatgctacaggacagaccactgttaattatttagaattaaaagagataccaaaatatatagatgcttcatcttctgtacctatctggtcttgggtggttagtgctttagctggtgcaggaacagttgcattattatcccagcaagacgccaaagataaaacacctccggaaccaggtaaattgtctttccaaaatcttttagattcaggggagttaacacaagatcaaatcacgaatgataacaagtttaatttaaaactcagcggacaggaaaagggaagtagcgtaacgtatttaatctctaccgatgaaggtaaaacctggcaagagacgacattaaatcaaaaagatttagctgacggtatttatctttataaagctgtagtgacagacgctgctggcaatacctcggaaacggctgtacaaaaagtagttgtggatactaccgcgccgcaagcaggtgaactgactttatctgacttgagtgatacaggtatttcagcaacagatcagatcacgcaagataaaaacttcaatttaaagcttgaaggacaggaaagcggcagccgagtaacatatttagtttctaccgatgaaggtaaaacctggcaagagacgacattaaatcaaaaagatttagctgacggtatttatctttataaagctgtagtgacagacgctgctggcaatacctcggaaacggctgtacaaaaagtggttgtggatactaccacaccacactcaggtgaactgactctatctgacttgaatgatacaggcgtttcagtaacagatcagatcacgcaagataaaaacttcaatttaaagcttgaaggacaggaaactggtagccgagtaacatatttagtttccactgatgaaggaaaaacttggcaggaaaccacggtagtccaaaaagatttggctgacggtatttatcaatataaagctgtagtgacagacgctgctggcaatacctcggaaacggctgtacaaaaagtggttgtggatactaccacaccacaagcaggtgaactgactttatctgacttgaatgatacaggcgtttcagccacagatcagattacgcaagatcaaaacttcaatttaaagcttgaaggacaggaaactggtagccgagtaacatatttagtttccaccgatgaaggaaaaacgtggcaggaaaccacggtagcccaaaaagatttggctgatggtgtttacaaatataaagctgtagtgacagacgctgccggcaatacctcggaaacggctgtacaaaaagtggttgtggatactaccgcaccgcaagcaggtaaactcactttatctgatttgaatgatacaggtgtttcagcaacagatcagattacgcaagataatagttttactttaaagctagttcaaccgattgtgattggggaacaagccgctttactagaccactatgaagtttcaaaagatgaaggaaaaacttggcaagagacaacagctgatcaaaaagatttagctgatggtatttaccaatataaagctatagtgacagacctagcaggcaatatctcagaatctgctatacaaaaagttgttgtagataattccttaaatgttgaatcaaccacagtgattgtaaagccgattactgaagacaatacaataagtctagttgaaaaagatcaagttatttctataagacttgaaatagctaatttacccacagatttaaatagctcactgacatcagtaaatacgacattagacaatgttacttataactttcattttgatgaagtcacgcaagaatgggttaccgaaattccagcagagtttctttggtcagtagagccgcaaaccaatatatcaattgatattagtcttactgatcaagctggcaatacagccattatcacacatacccaaaattataatgtggatcatactccgaattcaccaaccctagattcactaactttcaacaatatagatggagctatcatttcaggtagtgcatataaaggaagtaaggtcgatatctacaataaaaatggtgattggcttgcaagtacaataactaatgaagaaggtaaatttactttacaagatctttcaattaactcaaatcaagaagtttacgcagtcgctacttataatggttatagcagtgaaaattcatcaattgggttagttactgaagttccagctattagtattacacgaattagtccagaaggcgtgattagtggttatgcgactgaaggtagtcattttattgtaaaagatcagaatggaaatattctacaagaatttaattctaatgtatttgatagctctggtattacaccatttagtgtaatggcattaggcgaagtaagaccatttattttgtccctcgatcagcctttagaggaaggggctcaaattattatctctacagataaagataatatttcaggccatccacaatatattactgcagactatactccagcagtatttttagaaactccacaatttgatattagtggtgagactttatcagtacatgttaatgaacctaacagctttattcgtgcattttctggagaaggcaatttaattgctacaggttttaccgatgagcaaggctttgcaagtttacaagtgttccaatttttaaaagaaggcgaaacggttactgtacaagtagtagataaaaatcaaaatacgagtgaaaccctaatcgaggttccaaactttgcttatattccacatgttgaacgtattacacaagaaggcttaatttctggagttgctgaagataatagtacggtaattgtacgtgatgctgatggcaatgaattaggaaaggttacattaggtgatgataatagttggagtgactttagtcattttagcttgagtgtaaaccgccctttaattgatggagagaaaatttccgttcaaattattgataataaagggttaatgagtcctgagcaaaatatcatcgtagatctgactcctccacctgctccaacggagttaaatttcaatgatgctggtgatttagtttatggtcatgcagaacctttctctgaaattttagttaaagatgggcaaggaaatattcttaataaatggttttggaataactggaccgatgagagtggaagtttctcaatagaactaggtacatttttaaccaatgctgagacggtttatgtcacggctaccgatgtaaatggaaacgtaagtttagcagctcagatacaagcacctaattatgcctttgctccatatgttgatagctttacttcggatggcgtgataagtgggcaagctgaaaataatagtactctcgttgttaaagacgccaaaggtgacgttgtagccgaaattaaagttggtgaagataacggttggaatggatcgagttattttaaactccagcttgaccgtcctcttgttgatggtgagcagtttttcttatcaattaaggatgctcgtgggcaagtaagcaccgatactgtaattaccgctgatacggttgctcccgcaccagccagtaatttagttttctcagaagatggttcatatcttacgggtgtagcagagctgaatactacgattcaggtttttgatcataatggtcagctagtgaatatatggaataacaccattaactctgatggtacatttactatttacttaggtagcaacaatttacatggagaagcattcacagtcactgttaaagaccaagccggaaatgtgagtgaagctatttcaataaatgcgccacttgacgatattgcaccgaatccaattaaaaatattttacttgatgcaaatggtcaaaactttacagcacaagcagaagcaaatagtcagatcgaagtttttgattcattgggtaatcagacaggttggggttctacagatagtgcaggtaatgcttctggttctttcaatcaaacttatttacacggtgaggaactcacttttgttgttatagatcgagcaggtaatcgcagtatcgaatttaagcaaaatgctttaattgataccattgcaccaaatccgattgaaaatatcatcttcaacgaaaatggccaaagttttacagctcaggcagaagccggaagttctattgatgtattagatcagactggaaataagattggttttggttacaccgatagctcaggtaatgtatctggttattttcaacaagtttacttacacggtgaggaacttacttttgtcgtgatcgatcgagcaggtaaccgcagtgcagaggtcaagcagagtgctttgaatgatgacgtcgcaccaaatccgattgaaaatattgtattagatctcaatggccagaactttacagctcaggcagaagcaaatagccaaattgaaatcaaaaataataacggtgacgtcgtaggttatggatcagcagatagtgcaggtaatgtttcaggatatttgtatcaagtgcatttacatggcgaagagctcacttttattgtagttgaccgagcgggtaaccgtagtacagaggttaagcagaatgccttgattgatgatattgcgccaaatccgattgaaaatattatattagatatcaatggtcaaaactttacagcgcaagcagaagcaaatactcaaattgaagttaaaaatgctgttggtgagattgtaggttcaggttatgtggatggcgctggtaacgtgtcaggttatttatatcaagtctatttacatggagaagagctcacttttattgtagttgaccgagcgggtaaccgcagtacagaggtcaagcagaatgccttgattgataatatcgcaccaaatccgattgagaatattttacttgatgcgaacggacagaactttacagctcaggcagaagcaaacactcaaattgaagtcaaaaatactgctggtgaagtcataggatctggttcaaccgatagcatgggtaatgtttctggttacttctatcaggtctatttacatggtgaagaactcacttttgttgtagttgatcgagcgggtaaccgcagtacagaggtcaagcagaatgccttgattgatgacattgctccgaatgcgattgaaaacattatctttaatgaaaatggtcaaaactttacagcgcaagcagaagcaaatagcaaagttgaagttaaaaatgctgcgggtgaggttgtaggttctggttatgtggatagtgctggtaatgtgtcaggttacttgaatcaagtttatttaaaaggtgaggagctcacttttgttgtgattgatcaagctggtaatcgtagcattgaagtaaaacaaacagcctttcttgataatacagcaccggaaaatgcgactaatttagtatttagtgaagatggctcatatctaagtggtatggctgagccaaatgcgacgattcaaatatttgatcagtatggtcaattattaaatcagtggaataataatgttaattgggatggaacatttaacatctatttaaacagtaactacatgcatggagaagtatttaaagtagttgtagttgatcaggctggtaatttgagtggtgaggttactgtaaaagcaccgcttgatgatattgctcctgtagctgcaagtgatctggtctttaatgaagatggttcatccctttctggtgtagctgagccaaataccttcatccagatttttgatcaaaatggtcagcagatgaatacgtggagtcagagtgtaaatgctgatggtacatttactatttttttcggtacttacaatttacatggtgaagagtttacagtcattgttaaagaccttgctggaaatgtgagtgaagctgtttcagttaaggcgccgcttgatgatattgccccaaatctgattaaaaatattgtatttgatgcaaatggccaaagctttacggcacaagcagaagcaaatagtcagattgaaatttttgactcatttggtagtcagataggttggggctctaccgatagcactggtaatgtgacgggttacttctatcaagtgtatttacatggagaagaattaacgttcgttgttatagaccgagtaggtaaccgtagcgatgaaatgaagttaaatgctttgatggataccattgcaccaaagccgattgaaaacatcatctttaatgaaaatgggcaaaattttacagcacaagcagaagccaatagttttattagtgtcaaaaatgctgcgggtgagtttgttggctatggttatgtcgatagtactggtaatgtgtccggtcacttcaatcaggtttacttaaaaggtgaggaactcacttttattgttatagataaagcaggtaatcaaagtattgaatataagcaaaatgctttaactgatgatattgcaccaaatccgattgaaaacatcgtcttaaataaaaatggacaaaactttacagcgcaagcggaagccgatagccaaatcgaagttaaaaatactgcgggtgaggtcgtaggttctggttatgtagatagtattggtaatgtgtcaggttcttttaatcaagtctatttacatggagaagagcttacttttgttgtagttgaccgagcaggtaaccgcagtacagaggtcaagcagaatgctttgattgatgatatcgcacctaatcaaattgagaatattgtttttgatgtaaatggtcagtactttacggggcatgctgaagcagatactcgaattgaagtactagatcaatttggcaatcgcgctggttggggatatgttgatagccaaggtaacgtgataggttatttcaatcaggtttatttacatggagaggaattaactttcatcgttgtagatatagctggtaaccgaagtgttgaagttaagcaaaatgctttaattgatgatgtcgcaccgccagcagcagcaaatattacattaacttcagacggattgctttttggtgaggcggagccaaactcaactgttgaaattattgatcaatatggtgcagttatcacaacaacttatgtttggtacgatggcacatttaatcaatggattaatttgagtcaataccagacacaaaatttaagtattgttgtcaaagatcaagcaggtaaccgcagtgaagttgctcatcagttagtaccagtatttaccaactcaccaattgctgcaacagagctaaaattggatatagatggtcatattctaacagggaaggcgacagtaggaatgtcggttgttgttacatctactgatggtcagaccattaacggagggtggaataatgctgtgaatgaagatggtagttttgctattcagttaaatgattactatctacagggacagacattacaagttcgagtttatgatcagaatacgaatcaatatagcctaatctctgaaattattgcgcctttagacaatattgctccaataattaatgatgtggtaattaacaatgatggttatagcattactggacacactgatccgaaagtaatcattaaagtaatggatgaggacggagattttagagcagaatttcaatcggatgaagcgggatatttcaatgctagtatttatccaccactattacgtggagagcagttatttatcacggcaacagatttagccaaaaatataagtacgccatttaatattacttttaatgcagatattaatgcaccaccttcagcaaatcatgttgtgatatctgaaaatggtttctttattgagggaactgctttaccaaatagtgtggtgcgtatttatgatgtgtatagtaattatattggcggtggttttgtagacgaaacagagcattttaatatccagttatattcacctcaggcgaatgggcaaactttacgcgttgttgtggagcaaaatggctatcaaagcgcttacaccgaaattaccgcacctatagacactgtcgcaccaaatgcagcaactcagcttgtcttagaagatggaaatgtactttcaggacaagcggaagcatattcaacagttaatatttttgatgctaataataatttagttggtcagactactgtcggaagtgaaggtagtttcttaacacaattatggtcacaatattggcatggagaaacattgacggtaaaagtagttgatgccaatcaaaatgtgagtgtaagtacgacgattactgctacaaatgatacaacagcaccgaaagtggtcacccagcttgccataaatgaatggggtaattggctggtaggacatgccgaaagcaatgctactcttgaaattacatattattttgctgatcaagaaccttccgtaacgagtactacggtcatggcagatggaactttctctacttatgtgtatgggactgcaacgtcatttgaccttactgttattgatcgtgcaggaaatcgtagtgaaactatcagcaaagcgattaatgatttacctacaatcactgttgatcagtttaaaggtgatgctacggataatacgtatatagttgatcatataagtgattttgttgaagaatatactgttgagccgtatgcaatatataaagatgtttggattgataatagctatatgtatccagaatgggttagtgaaggtcattatgaacaaatatggtttgttgatggatattatgattcccaatggatcacaagtggttactcaactgtacaaaatgtttatcaagatcagaatggtataacttatattgataatggtacggcagatagcgattatagtcgatatgaacaacaatattatgatttcgtgaatgggcaatggcaagaaggctacgaactgacttatatacgttctgaagaaggttgggttgatacaagtcataatgaagatgtttatattgatacaagtcattatgaagatgtttgggtagatactagccactatgaagatgtttgggtagaaagtggctattgggagaaccagcttgtcgaatcaggctaccgagatttcgattttggtggacacgataaaatagtaagctctgtgagttatagtctggttggatattctgattggtcgacaggtctagaaagcgggcgttatgtagaagacttggaactggttggttctgctcatctcaatgcaacaggtaatgctttagataatcttttaacaggtaactctggtaataacattttgaatgggcgtgaaggtaacgatacctatatcactaatgaaggtactgataccattctgttccaattgctaaatagccaagatgcgactggcgggaatggacatgacacggtgttagattttactttaggtgatataagaactaaccttcaagctgacaaaatcgatttaagtgaactattaattgactattctaaagatgtaagcgcattagctaaatttattactgtagagcaagatgctgggaacacgactattagtcttgaccgagatggcgaaggtacaatgtttaatagtgtgtcactgttaactctaaatcaagtaaatacaacattagacgaattactaaacaaccagcaaattattgtttagtatgaatatttaactttaggaaagaggctatgaaaatagcctcttttattttgtgctttaaatttaataaaaactcttcacaacctgttaaaaaatgaccaaaaaaatagaatttttttcattttccccttgaagccatttttttcatccccacaaaagtgacatctaaatattttgttattgctctggattaaagcaataacgattaatcaaaaagactaagtctgatggagttaattatgagcaacattcgtccattacatgatcgcgttgtgattcgtcgcgtagaagaagaaaccaaaactgctggcggtattttattgccaggttctgctgctgaaaaaccatctcaaggtgaagtaattgcagtaggcaatggtcaaatcactgataacggcgtacgtgctttggatgttaaagttggtgacaaggtgttatttggtacttatgcaggtacaacagttaaagtaaatggtgaagaactcttaatcatgaaagagtcagacatcttagctgtattagaaggctaatcgatccataactcaattcattatcagattcagtatttaaaaagattcggagtttaatatgtcagctaaagacgtaaaatttggtgattcagctcgctcaaaaatgattgcaggggtaaacgtacttgcagatgcggttaaagtgactttaggtcctaaaggccgtaatgttgtgatcgaccgctctttcggcgcgccgcacatcactaaagacggtgtaactgttgcaaaagaaatttcattaaaagacaagtttgaaaacatgggtgctcaacttgttcgtgaagtttcaagcaaaactaacgacatcgcaggtgacggtacaacaactgcaactgtacttgctcaagcaattttaaatgaaggtatcaaatcagtaactgctggtatgaacccaatggatttaaaacgcggtatcgacattgcagtaaaaactgtagttgaaaatatccgttctattgctaaaccagctgatgatttcaaagcaattgaacaagtaggttcaatctctgctaactctgatactactgttggtaaacttattgctcaagcaatggaaaaagtaggtaaagaaggcgtaatcactgtagaagaaggctcaggcttcgaagacgcattagacgttgtagaaggtatgcagtttgaccgtggttatatctctccgtactttgcaaacaaacaagatactttaactgctgaacttgaaaatccgttcatccttcttgttgataaaaaaatcagcaacattcgtgaattgatttctgttttagaagcagttgctaaaactggtaaaccacttcttatcatcgctgaagatgttgaaggtgaagcgcttgcaactcttgttgtaaacaacatgcgcggtatcatcaaagtatgtgctgttaaagctcctggtttcggtgaccgtcgtaaagcaatgcttcaagacattgcgattttgactggcgcaacagttatttctgaagaagttggtatgtctttagaacaagcaactcttcaagatttaggtacagcgcacaaaattactgtttctaaagaaaacacagttattgttgacggtgctggtgatgctgctgctatcgctgagcgtgttcaacaaatccgtgctcaaatcgaagagtctacttcagaatatgaccgtgaaaaattacaagaacgtgttgctaagttagcaggcggtgttgctgtaattaaaatcggtgcagcaactgaagttgaaatgaaagagaagaaagaccgcgtagacgacgcacttcacgcaactcgtgcagcagttgaagaaggtgttgttgctggtggtggtgttgctcttgttcgcgctgtaaatgctcttgaaggcttaaaaggcgctaacgaagatcaaacagctggtatcaacattttacgccgtgcgatcgaagctccacttcgtcaaatcgttgcgaatgctggtgatgagccatctgtagttatcaacgctgttaagaatggtgaaggtaacttcggttacaacgctgcaactggcgaatatggtgatatgttagaaatgggtatccttgacccagctaaagtaactcgttctgcacttgagcacgctgcttctgttgctggcttaatgttaactacagaatgtatgattactgacattcctgaagacaaaccagctgctccagatatgggcggtatgggtggtatgggcggaatgatgtaataacgcatcaacgctttaacccaaaaaaatccctgcattcgcagggattttttttatttttccagtaattttaaggataagttaagttcagaaccctaaaattaaaacaggaacagcagctagaagttcctcttttgttacaaccatgcttatctatttataagcatggttttttttatccaaataaaataataagccaagtggcgacaataatagaaagtgcaacaaactgagcggcactacccatatcttttgcatttttggaaagttggtgtttctcgagtgaaactcggtcaaccactgcttcaatggcagagttgaagagctcaacaatgatggcaaataaacagacaatgatcatcagggcatgttcgccgcgagttacatccaggaaaaagcttacagggatgagtacaagattaattaaaacaatttgccgaaatgcagcttcattttgataagcagctttaaatcctgaaattgaataactggtagcgttcaagatgcgctttaggccacttttacctttatagggagaataactatccattcacttatatttttgacacttttcatgcattatatagtgcagcccttaaaaaaatattaaatcttttttaaagattttgactttataactccatagagaagaagagatgaaaaaactatttgtagccttaggacttataatgggtagcttgcatataagctatgcagaaccagcttcagctcaacaagtacccggatattaccatcatcaatttggtaattatcggataacttccttgctcgatggcactatttatctagatcctaaattgtttaaaaatttaagtccggctgaaaaaactaaaattttaacgaaatatgctgctgtaaatgagaaggggattcagacttcagtaaatgcctttttagttgatgatggtaaaagtttgacgcttgttgacagtggagctgcgagttgttttggtccacagttaggttcaattgctaaaaatcttgaattagcgggctatcaacttgccaatgtgaaaactgttttattgacccacttacatccagaccatgtgtgcggtattgctcaaaatggaaaagccgtatttcctaatgcaacgatctatgctcatgaacgtgaagcagattattggttaaatccagcaaatgaaaaaactgtaccagcggataaaaaagaaaattatttaggtactgttaaaaacgtaaaagctgcacttgcaccttatcaagcaaaaaaagcattcaaaacctttaaagatggtgatgttattcaaggttttgaagtgatcaatacacatgggcacacaccgggacaccatagcttccgtttgaagagtaaagggcaacaaattgtctttgttggtgatattgtccactcacattctttacagtttgatgctccaaaaactggggtagattttgatgtaaattcagagcaggcaattaatactcgtttaaaaatgtttgctgaaatttcaaataagcaacaatgggtagctgccccgcatttaccgttccctggaattggccatgtgtataaagtgagtgctgagcagtatcagtggattcctttatattttaataacagtcttgataaataaaaaaacagggcattcattgccctgtttttttatgaagattgagttattttactgctttttcaaaattagtgacagcttcgcgaccgagtgccgggtcatcggtaaagacgccatcaacgcctgccttgaaataggcttcaaactcttttaatgcaccagatggacaacgttctgcaggtttatctgggctgcactttaacggcgctggtaagaagttgttttctggtcggaaagtgtaaggatgtacttttaaaccagccgtatgtgcatcagcaataaacgtactagttttataagagccatcattattaaaggtcagtatgtaacctttacttggtcctacaccatttgcatatttggcaacatcttttaacccttgtgctgtggctaaatcagcataagttttagtgtcaccagactctacgaagtctgctggtcgagatgtttttgaatcgtatagctgaataatttgtgcatgtttaagcgttttatgaagatcaagctccctttttaaatcttttagattctgaacttcaaaagactgtaaatagacaggtgcaatatcacgtgtatatttatatttggctaaggtttttagaagagtatcttccattgccagattttgatttttaaaataagtcggatgtttcgtctcaatatataaacctataattttccctgtctttttatagttagcttcggcaagctcaatgatttgttctagagttgggacagggtaaaggtcattataagctgtgttggctggtcgaaactcaggaatacgttcacgcgctttaagctgctgtaattcacttaaagtgaagtcttccgtgaaccaaccagttaagtcgacgccatcaatattttttgttttttacggtctgcaaactgacttaaagtgcttacattggttgttccaccaatctcattttcatggcgggcaaccagtacgccatcttttgtagagactagatccggttcaatgaaatctgcgccgtcatcaatcgctttttgatatgaagctaaagtatgttcaggacgtaaagcgctagcgccgcggtgtcctactactacaattttaggaagttgatattctggcgtggttggcgtcgtttcagttttatcgtcatcattacaaccaaccaagctaattaaacttaagcataaaagtgcttttctaaacataattctactcatattgttttagttgaaacgactcaagtttcagggctttgtttgacatgatcatgaagaattcatgaattttaagtgacactcgttaactggttttttattggtttgttggaaatattcaatcacgctttgtttttgtcttaattacatttattgtttaattctacttgtcttttttataccgctcgttgatcatcacaaggtctcgaagcggcatttacttctgttaattaacgacatcataccgagcagccatgctatctaaattttttattcaacgccccatttttgccaatgtattggcgatcattgttatggctttcggtattttttcggtcatgaatttgcctgtagaacggtatccagacattgctccacctaaaattactgtgtcagccaactatagtggtgcagatgcacaaacggttgagcaaagtgttactcaaattttagaacagcaaatacaagggattgatcacttactctattttagttcatcaagtgactcatcaggacgtagccgaattactataagttttgataacggaacaaatccggatactgctcaggtccaagtacaaaatagtattagtggcgtaatacgtcgcttaccggatgaagttcaacggcaaggtgttacggtaagtaagtcactgggtgacacttttatggtaattggcttatatgactcgactggtaaaacaggaaacattgagctatcggactatttaactacgcatgtggtagataacctgaaccgtattgaagggggggtgaaactgatgtatttggttcacaatatgccatgcgtatctggttaaatccggataaattaaaacaatataatttaatgccaagtgatgtagcgaatgcaatcaccgcacaaaatactcaggtcgccgcaggggcaattggtgacttacccgtaattgacggtcaatatttaaatacaaaagtcacagcaggttctcgcttaaaaacagttgaggattttaaaaatattgtcgtgaagtcgaataaaacggcgagttatgtgtatttaaaagatattgccagagttgagctaggtgcagaaaactatcagtcttttaacactattaatggctatcctgccgcaggtttgggtatttctttatcttcgggtgcaaatgcaattcagacctctaagctcatccaccaaactctagatcagcttacaacgaaactaccagcgggttataaaatcgtttatccacgagataatacgccgtttgttcaagagtcaattaaggaagtagtaaagactctggtagaggcgattattctggttattttggtcatgttcctgttcttacaaagctggcgtgctacgctcattccgagtattaccgttccagttgtgattttaggaactttcgctgtcttatatgtgcttggttttagtattaacaccttaacgttatttgcgctggtactcgcgattggtttgctggtcgatgatgcaatcgtggtcgtggaaaatgttgagcggctcatgcatgaacagcacttatctcctaaagaagctgctattgagtcgatgggggaaattagtggtgccttagtcggaattacgttggttttaactgctgtttttattccaatgtcctttttaggcggttcaattggggtgatttaccgtcagttttctattactttagttgccgctatggcgttgtcgcttattgttgcgctcattttaacaccggctttatgtgcattaattttaaaaccaaatcttcaacctcagcgctgggccgtatggtttaaccaaaagattgagcaacttaaaaatcaatatatcaagcttgttcagacgagtattcattacagtaaatcagttattgtgatttttgtggctttaattgccgtttttacgctgttctataacggtttaaaaagcggttttattcctaaagaagaccaaggaattttaagtgttcaaattaagctcgtagatagcgcaccaatttctcaaagccagaaaattggtgagcaagtccgccaatatttcttaactcaagaagataaaaatgtagatttggttttaatccgctatggacgaaattattcgggcacaggacaaaacttggcacaagggtttattgctctaaaaccgtgggatgtccgaacaggaaaagaaaactcggctgaggctatacaaaagcgtgcaatgaaatactttagtcattttaataatgcacagattaatgtgactttacctgcctcagttaatggcttaggtcaaacagatggcctggatttatggattcaggatttgaatggacaagggcaagattttctagatagtgccttccgccaattgcaggctcaaagtaaaaattattcaactttcgaaaactttgataagcagtcaaccaatagcaaggcaaatcttaatattaagattgaccagaaacaggcactagcaaatggactacagctatcggcaattaataatactttatctagcgcatggggcggaacttatgtaaatgactttattgatcggggccgtattaaacgtgtcatgattcaaggtgatgccgagtttagatctaaaccggaagatttatataactggtctgtacgtaatgaccaaaatgaaatggttccctttagttcatttgccaactttagctggggcggggcgccggaaattgtaaaacgctatatgggatatagtgctttacaactacaagcagatgtcgcgagtggcagcagttctggccaagcgatgaaagatgtagaacaacttgttaaccaacaaaaagatattggtttagcgtggacaggtttatcttttgaagaacagaagtcgactaatcaggccgtatggttatatttaatttcggctggatttattttcttatgtttagctgctttatatgaaagcttaagtattcccgccgccgtaatgacatctattccgcttggtgtaggaggaagtgtgattttctcttatatttttggtttgccaaatgacgtgtatttccaaattgcgctattaacgactattggtttgtcatgtaaaaacgccattttaattgttgagttcgcggccttagcgcaagaaaaaggtaagaatgccattcaggcggccttagaaggtgcgagcttacgattaagaccgattttaatgacatctttggcttttggtgctggtgtgattccgcttgtgtttgcacaaggcgctggtgcggttagtcgtcaagaaattggtattagtattttaggtggcgttatgtttggtactgtgctggttctgttctttattccagtcatgtacgtgttactgcgttccttgttcagatcgaaagcttcaacctaaaagtaaacaatttaaaaacgggcatcaaatcaagtatattaagattaacttttcttcttatatttgattttgatgcctcaagaaaaaaaattaacacagcagcaggttatcgccctagaacgggatcttgccaagttcgcaaccatgatggatagtgcggtccgtattccttttacaaagcagggtattggcgctgatgctgccttaagtactattccaattgccggtgatgtcgctgggttcgcactgacgtgttatgccatttataaggctaaacaaataggtgtgcctcagcataagctcactccagtgatcaaacttgctgtagtcgatgccgtagtcggttttgttccagttgcagggactattttcgatatttttatacgaccaagtcgaaaagcattagatgtggtgcatacgcatattcgtgaagaatatgcgatccaaagtgatattcatgtcgttcatccgtatttacatgaaaagctcgaaaagaagcaacaacagtcggccttctggcgtaaccctgttgtgagttggttatggttgcacatacccgatttattaggtgcgtttgtactgctattaattggcttagctgtgtggtggggtgcaagttacctttggggactttatcaaaccatgtaatcaaaaaataaagcctccatttggaggctttatttttacattaaacgttttatgggcaatctaattggtgtagagctgccacacgttgttcaattgtagggtgagtttggaacaatgcagctaaactaaagccttgttctttaccttccgcaattgcgaatgctttcatttcttttggcatttggtcaggtaactctgtttcagcttgcaaacgtaataaagcagaaatcatcgcttgtttaccagctaaacgtgcaccggcttcatctgcacggtattcacggtaacgagagaaccacatcacaatggcagaggcaagaataccgaacacgatatctagaaccattgtaatgatgaaataacccatacctggggcttcattgtcttgacgaccaaagacattacggtcaataaagtcacctactacacgagcaaagaacataacgaaggcgtttactacaccttgaatgagtgcgagtgtaaccatgtcaccatttgcaacgtggccgatctcgtgcgcgagtacagcacgtagctcatctttgttcatacgctcaagtagaccgcttgaaacggcaactaaggcatcatttttattccagcctgttgcaaaggcattagactgatatgaagggaagataccaacttctggcatattaataccagcacgttgagaaagttcagcgactgtttgcaataaccagctttcagcttggttacgaggagcatttgggtcaatcagttctgtaccagtagttttcttagccatccatttggacatgaatagagagactaaagagcccaccataccgaacacaaaacagatgactaaaaggttgcctagatttaagccacccgcgccatggtaactaccgacaccgaagagtgacaaaataatgccagctacaaccagtaccgcgaggttggtaagcaaaaacaaaccaatccgcatcattgagaaaatcctcttataaataaaatattatctgatttataaattataaatcactcagctaatatgcggcgcttaggggaaaaattcaagaaaaaaataaggaatcaatacattctttgcgatcgaagaatgtatttaaattaaacaagttattagagagcccctctgaacacgacagtgggggtaatagatcattacaattttttgacaatagggcccgctaaataaataaccgtaaggtatgaggcttttaaagcttactcaatccggatatgtgcaatagcagttgcattattggtgacataagttcccgtaggtgcatctgtatatgtaccatctggcaatgtaacgatttggcgcgaagaagaatacttaataggctgagcagagacttgcgtcgaagtactgtgcggtatggctggttggtttatcgcttgggcagaaatactcgaattgctaaaagaagaaaggcctacaccagaagaatataagttttggtagcggctagtgactcggcgaacataatcttgggtttcacggaatgggggaataccgccatatttatcgacgtttccttctcctgcattataagcggcaagcgccatttgcgtattaccgttaaaacgtttgagcaaccaacttaaatatttagcaccagcgaagatgttttgctgaggatcataagcgttagatacgttaaaacgacgagcagtagccggcataagctgcattaaaccttgggcaccaaccggagagtgggcatttacgttaaagccagactcggtatgcataacggctttgattaatccttccgaaacgccgtgctgttgtgctgcctgcttaataatatgatcaaaagcatttttgtttttgctatagcttggtagaaccgaagcttctgaagtcccccagttgctataactatgaatattactatccgggtagtaggtgacttttacttttttgagtgaatggtcataacttttacggttagtcagtaaagtactgccgtttttgtcttggtaaatgtacatctgacctgctgaagtcggcgttatacctaccgaaaaagtggtcatccccagtaaacaagaaaaaagatattgaaccgaatttttcattttatgttattcacaattttagggtctcaaaacttgtcaaagagtttatcaaaaaatattacttaaagaagttttgtgtaattttttttattttgactctttgaaaaaatcaagcagttttgctcgaatgatcatcaaaaaaaattaaaaaaatttttaaaatgattctattgacttgaataactatttgaaaaataagggtaaaaatcattggttaaaaaatgatcaatttaaataaaacccttaacagaaggtcaaaacagtttgtcaagtattaagaaatccacaattttatccacaggttttgtggaaaactgtggaaaagtccaaaaagtaagcattttgcgcaaaaaatgaactcgtcggtcaaaatggcgcactgcttttgcatcatgcctgagcattatgacgacttcaagaattgaaactattcttttgatgcgattctcatccgaatcatataaaattgcgcggtatttttatttatgggtatatctcgtctatgtacgcgccagttgagtccaacgaaggatttaattttaagcctgaacttccaacaagctcggcctattatcgtttgcttaagaagcttcgccgtcaagttggacatgccatccgtgacttcaatatgattgaagatggtgacaaggtcatggtgtgtgtgtctggtggtaaagacagttataccttgctcgacattttgttgcagttcaaacgtattgcaccaatcaattttgatattgttgcggttaaccttgaccaaaagcagccgggtttccctgaagatgtcttaccacgttatatggaagaaaataacattccgtattacattttggaaaaagacacttacagcattaccaaacgtttaactcctgaaggtaaaacgtactgtgctgtgtgttcacgtttacgccgtggttcgctttatggctttgctcaagaaattggtgcaaccaaagttgcgctagggcatcaccgtgatgacattattgctactttcttcttgaacttattccatggcggtagcttaaaggcaatgccacctaagcttttatcgtcggataagaaaaatattttgattcgtcctttggcttatgttgaagaaaaggacattatcaaatatgcagagttacgtaagttcccgattattccgtgtaacctttgtggttcacaagagaacttacaacgtgccatgatcaatgaaatgcttcgtgaatgggacaaacagtatccaaaacgtttacacagcatttttggtgcgttacagaacgtttcaccttcacaacttgctgaccgtgatttgttcgatttcgaagttcttgactcgcagcgcgaattagactttaaagatccagaagaactgaaaaaacgtttagatgtagtgaacttaagctttgctgctgaataaaacgaattaataagtcaattgaaggcactttataaacaagtgcctttaatgtatcaaaatactaaaaaatgaatgttccgtacaaaaagtcatagctcaaccttaaaattacatgctataacaacgctcaagcagaagtgcttcacacgatgttgtctggataggcaacactagagaaattgaacaaataaatttgaggaagaatcatgcctgcatttttaactgatgattggtttgcgactgtcgaaaaattaactgctgaagcaggtgatcttaatttgccaccagctcttgcgaatttggcaattaatttagtagttacagatgcttctggaaataccgaattagcgttagatgggggtaaaatccaaaaaggtttgtcttcaaatgccaaaactacattaaacatggatgctgaaactttacgtaaagtattccttgagtttgatatggcagctgctatgcaggcattcatgactggtaaaataaaagttcaaggcgatatgtctcagttaatggctttacaaacagctaaaccaagccaagaacaaaaagatttgttcaaaaaagtattagagcaaaccgcttaaactaaaaaagaattcatataaaaagcttacccgagaggtaagctttttatttatacaaacaatgaatttatcaacttttagatgataaaaactagatattaattcgcgtttgtgccgttttaatgtgctcaagataagcacgtatacgagtcacatactgaactgcttgtttgtatcgaccattgcgagttttgttactctgcaaataattatagagattaacccattggttcgggtctttcccttgggcttgcaagcgcttttgaatctggttcactgcacccggtcccatattgtaagccacaagcgcataccagttgcgatctgggaaaggaatatcatcatactcacttaacatgagatcataatatttcgcaccgccctgaatactctgtgctggatcgttacggttactcacacccattgcccgagctgtactattggttaacatcattaacccacgtacacctgttggtgaaacagactccggttttaggtacgattcttgataaccaatcgctgcaagcaaatgccagtctaaatcgtactgagcagcactttgtttaaagcttgctttgtaaatcggtatacgtgcacttaagtcacgttgaatcgtagaccaagcttctggttttacaacattacggttataaaaagaagcaagttgctgagttagaccattttgtttgctttgacaaacaaaaccgcttgctgtttgtgtaagcggatcatctgcttgtttaaacacccagcttagattcggatttaatccatttttttgcaaatttacgatatcaccacaacttgcagaaaaagacattaaacctttgttctcgattgaacttaagcttgcggttgtcatggcaagatttgctttaccttgctgaacccacttaagcgccgtggcattgtctgtcacgattttgaagtccaactttacatttaagctttgtgcatagttacgcgctaagtcataaccgaagccgtgtaaaaactggtcttctttaaaaacagtcgttgggctttctacagcaaccactgttaatgtgtttgtgttaactacagtattgtactgtagggtttttcctgcattgatactatgaaagggaaaaaacatagtgctgagcgcaagaactttcaatgggagagaagaaaataaagagctaaggccaagcctcgacccagaacttgaattactgtgcatgttgtctccgctacaggtaatttatgccctaaaagtcagacaaaaagctgccataacttctaaaagttgataaattcaataaggggtgggcagtcatgacgtcattcaaaatgacatgaaatgaaaaaagcaaactgtgtagaaaatctacatagtttttgagtgggttaaaaaatactcaacatttaagatgcgcgcatcataatattgataaaaagtattgtcaaattttgtacaattaaatatccgatatatcatcataacaacatgaatttattaaggaagaaaatttatacacttctgatgtgagaaaatagggtataaaatgctacatcttgtaacccttatgttgttaatcagtggtttttaatcatgaaatctaacttaatcactcggtcaggccatgacaaattagttgctgaattaaaacaactttggcatgaagaaagaccagaaattacgaaaaaagtaaattgggctgcaagcctcggtgaccgtagtgagaatgcagattatcaatataacaagcagctccttagaaaaattgatcgacgagtacgctacttaggaaagcgtttagaagagttaaaaattgttgattactcacctgagcaagaaggcaaagtttactttggtgcttgggtcgacattgaaaatgaagaaggggagcaaaaaactttacgaattgtcggggtagatgaaatttatgatcaccatcctcagcatatttcaattgagtcacctatggcacgtgcactcttgagtaaagaagtcgatgatgaagtagaagtacacacgcctttgggcaaaaagctgtggtatatcaatgcaattcgctatgaaaaacctaaaaatgatgaaatttagatagatttgtttttattttgagcgtttgaattaaaaattaaataaaagatttgccaacttgcatttttgtttatattatagcgctcgttggaagcgtggcagagcggtttaatgcaccggtcttgaaaaccgacgagggtgtgagtcctccgtgagttcgaatctcaccgcttccgccaaaattcttaaaaagcccttgttaatgacaagggcttttttttatgcatataagttactaaaaaatgatcgtgttcccttctacatatttctaagtatagtctctcccgttcgagggttcgttaaagtgacattttccagcgcctgaatgtaccaagaatgattcttctgggtgagcacagtaagaatgagagtatcaatctgatgaggcccttgaggatgagctacgcctgcagtgaggcggctccaaaaatgtgaaatacatatatcctcactcataggtatgaggtctatcagctcattctctagtgttgaatcacgataaatggtttcatgaataggttgatgcattgcaataatttcatcaactcctttaacgtagtgaccgaaacggttaacgaaagtcgcatctttatcaaaaagagcagcaaaggcctgcatatcatgcttattccaagcggtttgaaatgctaaaggtatttcttttgggtttattatgtgttgactcataccagcaccactgtttaattctttaagtccattttcaaatattataaataaagatacttcgtcatgcttaaatgaaacaggtgatcttagctcgcctttcaagagtatcttcgttttaacccacatggcccaccgcacaaaataggataggttgagttatgagtagaacgtgtaaataactgctcgctcaatccgcttaatggagttaactttttataaaatccagataaagatataagttaaaaagaattgatgcatacaaatttaatataatgttaataatcaaacattatgtataaatttaaataaactcttttattttttaagaactcttttaataattcagaactaaacaattaagtttaaaatatggagaatttgtatacaggatggcttttattagtttaattaaaatgagaactatataaatcttgtgaattctagctttttacttcattagttttgtacgtttttatcttaaagataatcataaaattagaataataatattaaatatttgatttttatttataaattaaaattaacagctaaggttcttactgtgttgaataaacatcaaaactaaaaaatttaatcttgctttaagttctcttaattaatttatggcctatctagatttcgttaatgggtcagaaaaataaattatgacttcatttaagccaaatcagaaaattaagagagtataaaaatgaaccagtttgtaacgaacacgaaaaatgtaattcgtggaaagtatcatccggaatttttgcagaatgaagtcttagccgatatttttgctcatactgcacaaactcttcctgataaaacggctttaattgaagcagataaaacgctgagttatggtgagctgtatcagcaagccttaattatggctcaacatctggctttaaaaggggtaaagccaggtcatattgtagggctatggctgccgcgtggtattgagcttttaaaagctcaactggccatttgtttaagcggtgcagcttggcttccttttgatatggatacgcccgcggaccgtattgcggtatgtcttgaagatgctgaagcggtaggaatgattactacagatgaatggtatgaacatttagctgaagtgccgcaaacaaaatggaccaacaccgagctgcaaaaaccattaagcgaaagtgtaagtttagcgaaaaccactccagatcaacctgcctatattatttatacctcgggttcgacaggtaaacccaaaggaattgtgattactcaaaaaaatatttgtcactttttacgtagtgaaaatagtattttgggtattcaagagcaagacaaggtctatcaaggcttttcagtcgcttttgatatgtcgtttgaagagatttggctttcttatttggtaggtgcaacgttgtggattgcaccgaagtcacttgtcagtgaccctgagcggttatgccaaaccttaaagcaggaacaaattacagtactgcatgctgttccaacgttacttgccttatttcctgaagacgtacctaatttaagaattattaatttaggtggggaaatgtgtccggactcactggttgaccgctgggcattacctcatcatcaaatgtttaacacctatggaccaaccgaaaccacggtttctgcaagtcttgagttattagaacgcggtaaacccgtcaccattggcaagcccttaccaaactacggtatgttggtcattaactctgaaagagagttgctggagcaaggtgaaacaggggagttatgtatttttggtccaagtgtggcacaaggctatttaggacgtcctgatttaaccgcagataagtttattgaaaacccttgggcaatgagtgtagaggaagaattactctaccgtactggggatttggctaaaattgatgagtttggtcaagtacactgtttaggtcgtgccgatgaccaagttaaaatccgtggtttccgtgtagagcttggcgagatcgaagctgcgctttgcgatattgatggaattggtacggcagccgttattcttcgtcctgaagacggcattgatcaacttattgcgtttattgcgccagaaattgatgcaaagcaagctatagaaattaaagaactacggcataacttgagtcagcgattaccgccttatatggtgccaaatcgttttgagattattgaagaagttccacgtctattatccgggaaaattgaccgtaaagctttaaaagcaagaccgctcacaagtgtggtagatcgcagtgaatctgaccagccacagaacccggccgaagaaatcctatttgaaattttgaatcgcttgttcccgaacatgccgattaaactcgattcagatttcttcgatgatttaggcgggcattcactactcgctgctgttttaatttcaaatctgcgtgagcatgcggaatatagccatctgaccattcaaaacttatatcaagcgagaagagtaggcgcgattgctgcactcatgttagagcagcctgaacctactttatttgatagccaaattggacaagataaccctcgtaatcagacctataaatggttatgtggtattgcacagcttgtaactattccggttttaatctcgattaatattttgcagtggttagcgccattctttacctatcactactttaccggtggaactcgcgacagtattccgtatgcgattgcgttgtctttattggtgtatgtcagtgtcattatgagcagttttgtactgtcgattacggtaaaacgactattaatgttaggaattggcgcagggcgttatccattatggggattaacctatttccgttggtggctagcagaccgtattagtaatatttcacctgtctatctcttgtcgggttcgactttacttaacttatatttgaaagcacttggtgcaaaaatcggtcacgacgttaccattagttctgtacatattcgtatgccatctttactgactattgaagatggcgtgagtatcggttctcaggtgaatttagaaaatgccaaagttgaacatggccacttggtattaggttcaattcaccttaaacaagacagttatgtaggttcgtatgctgtattagaagaaaatacagtgttagaaaaacaggcccatgtaaatgccttaacttcaattgaatatgacacggttgtacctgagggcgaaatttgggatggaacacctgctcagaaaatagggcatatagatgagcaagctaaattgccagagcgtcctaaactatcgtttatacgtaaaattgctgaatatggatactatggcgttagcgcattaattattgcctgtcttttctttattccaatttttccaagcttccttttggtcgactggttagatgtaaatgtatttaatattaacccgaacaaccatttgcaaatcgcgctttattatttcattttagcgattccggctagtgcaatgatgatgatgattactgcggtgatttcttcaggtttacgtaaaattgcattgccgcgtcttgaaaccggaacctatgcggttcatggcagcacatattatcgtaaatggtttgcggcccaaattttagaaacgagcttacaaaccttacatggcttgtttgccaccatttatgcgcctacatggttccgtatgcttggagcaaaagtaggtaaaaataccgaaatttctaccgcaaccggcgtcattccagaaatgctgactttgggtgaagagagctttattgccgatgctgtaatgctgggtgatgaagagattaaaggcggttggatgtctttaaaagcaaccaaaatcggtaaccgtagttttgtgggaaatagtgcttatattgctgatgggacagtgttaccagacaatgttttaattggcgtgcaatcaaaaacaccagataaccgtgaaatgtatgatggacaaacttggtttggttctccggcgttgctgttacctgcacgtgaagctgctgaaaaatatcctgaccatttaacctttaaaccaagtattaagcgccgtttaatgcgcgggtttattgaagggcttcgtattgtattgccggccgcacttgcgattggggtgggttatatgatcgtgctagacgttattgatgtgattaataactacaatattgagacgggtctggttgcattaacgctcgcaggactgctttatggtgttggctgtttccttattgttgcgctattaaagtggattttgattggtcgctatcaaccgcgttcgacacctatgtggaccatgtttgtatggttaagtgaagggattaccagcctatatgaatcagttgcgattcctaacttcttaaactacttaagaggaacaccaatgttgccattcttcttgcgtattttaggggttcgtattggtaaagacgtttatatggatacagctgatattaccgagttcgactgtgtcagcattggtgaccgtgccgagtttaatagcttctcgggcccacaaactcacttgtttgaagaccgtattatgaaaattgggcaagtaaatgttggcaatgatgtagtggtcaatgcgcgcagtattattttatataacgcaaacgtgagcaatcatgcagtgttagggccattaacactggtcatgaaaggtgaaaatattccggctaaatctgcatggattggttcaccggctgtgccttgggttcacaaataatactttgttgaattgaaaaaagcctctgtagaaacaggggcttttttgtagataacttatgattaacctatttagcttgggcctagtagaggggtgtaattaaattcatgattatctatataacactaaatattttttatacttcagataatattcattatattaaattgattaattttatacttttaaacttagttaatttttgaaagattactattaaacttatataaagactatggttatgagttagaggttgaaaatcaatggaggattctatttctctttttctttgagtgacctcttatccacagtgtaagttggatgaaattatttaaaagtataatttatagaatttttttactttttaacttataataagccgatgttcgcaaaagactaattatggcttctgctggattcgagatatcataatttttaacaaagattgtacactattactatgaatacagatgttgttgagttaaaaaccattaatgaagttggtttaccattagatcctgagacattttctagagtaatcctagattttttagggcgtaaagaaaatttatcttataaaagtcatgataattttattataaatcttgaagatatatctcaatttaatcatattttaaatagtaaaatttcttatcaaaaaaatattattcttgaacatttttcaattaactttggatattcagatggtacctttcgagaaataaatggcagtgaggctttgagtaaatttctggaaacaaggtcgattgatacaactagtataaatttaaattggaaaattattattaagtttgatcacagtcctactatagaaacgcaagagattgatttattatttatttcttctatagagaaaaaaattaatgatgaggatttttcatatatagagctttctataaaccacactaatcagtcatgggccttggatattttaagtgcatttaaggataaaattaatgagattgctataaaaccttcaatattaaaagaaaaatataataaaataacagataacttattttttgcaactatagtgcctatgttttttattgtgttaggtttaggtttaactatccctgttgcacagaatgaaacgcaaagacttagacaagatttagttcaatataatttgaaacagaactataaagatgatttatcaaaagttgttgggcttttaaatattacaactcttgaaagatctgaattaaaagaattaggtactaaaaataaggaaatagaaaagataattgaaaaaaatcaaaaaaatgttgcattacacttaactcttatagttttactttttataattccttttgttgttcgtaaatatattaaatatagtattaattattttaatcataaaagctttattttagtaaataattattctcaaagaaaattgcagaaatataaagatgataaaagtaagataacctatataggatttactgtctttgtaacttcaataacattttctatattggcatccgtaatttttaaggtattagatgctcttgttttttaaatagttaaattaacatactatatcttatacgaaatctctctagctttaaaaatagcctattatcaataggctatttttatttcccctttataaacccccatttaacaataactcactcattatttatccttactttttaatgatctaaattaaaacaaatgtcattttgtgtgcttgactgcaaaagggttgagcactattctttgcctgctggccacattgccagccggctttgacaggctgattcaaacgagcattaaaggttttatacttttagtgtgtacaccctcgtgccccctctgcggcggaacgggagggggacacctttgggtgtgctggcctcgtttgaccagtctgtcaaccctctttcgttctgccaccataattttaatgctttggcagaactcccaataaaaaggagttggctttgcacatccattatttcttggcaagctttgccaaaagctataacgacaccacataagctttaaagcagtttgagggccattagcgctttcaggctttaaatcgtcacaaccaaaaacttagcaacaataaaacttgagatgtgccaagcacagtctttataggctttgctgtgcctttttttctcccaaaaaagtatctcatttacaaacaacaagaatttataacggtaaaactatgccaaatttagttcttccaacacgtgccttatatgttgtaaataaagcaattgatctatttcaccaccggggatttcaccttattggcgtcgacaggatagtgaaagagtcagagattacaaaagccactttttataattattttcactctaaagaacgactcattgaaatttgcctgatggtgcaaaaagaaaagctccaagaacaagtggtcgcaatggtcgaatatgacttaagcactcctgccatcgataaactcaaaaagctttatgatttacataccgatttagaagggccgtattacttattatttaaagccgtttttgaaattaaaaatagttatcccaacgcttatcaaaccgcggtgcgctatagaacctggctaaaaaatgaaatttatagccagcttagagtactaaacgcggatacttcttttaatgatgccaaactatttttatatatggtggagggcacaatcattcagcttttaagctctggtggggtagatgaaagggagagattactagattattttcttggtctaagtgatctaggccgatttcaaatagaaagttaaggtcaatcaaaatacatacaaattaaaagagttatttctataaaagcccgctaatgagggcttttatagattggtttttctagctgaggtagtctctaagaaagcctgcttggccaaatagtttttctcggaattcggcttctaattgttctgtttgcatgtttaacgggtcaaaattttctgctctgacatccagcatatctacaaatgctttagacaaaattccgacccgattgattccaccaaaacctaaataaataccatccttcaactgtttcaaagtgaagttaatatcttttctttttaagatttttatccaatatttaaaaataataggcgtgatgagttttgcaactctagctaaagctacttttctgtttttgctagaatttcctcctatcgcatttaatacatcaaacgcgaccgatttatgctcaagctcctcgagggcatgccactcccacagatttctgctctcttgcgtggtttttgctttaattaacgagtctgtgagtaataggcgagcaagtgtggcggtgtagtgttccatcacgactgtagcagtgacttgttcgactgctgaaagttgacgtaatttatccaagcgtgctttggttttggcctcaatttcgacaacttcaggatagttcgaatggataaggtgattgtttagcgttttatgttcacggctatggaaagcttcttgagcaataaaggcttttatatcttctaaaagtttttcatccttaatttgatttcgaacatttctaatgctttctataaaaaacatttcaccagcgggaaacatcgctgaaagtacaacgaataaggaagtaacaacaggattttcctcataataaaaagagtaacttttatgatgatcgtaagtcagttcaacattacgacgaaaaattttttgatccgattttagagctgtattcatttttttaaactcatctttataaaataattgatcaaattttgatttatactaaaatttatcaatgaatttatacagaaaaaagacggattattagaaggataaaaaattatggtaactataagaaaaccaaaacaaaatagagcaataaatacctttgattctatagtgggtgccggatttatatctgttatgaaaaatggcttggaccatacaacagtacttaaagtgtgtgagatagcaggcgtaggatcggggagtttttatgagtactttaaaaataaagaagcactttttgttgagatgcagcagcactttattgcagaaatttcaaaagttatttatggcgtgattcctgaaattttagatttagagattcctgaagcaatcagaacaatttttttaaaaatcggcgagtttttggcaaaagataataataaatatttttattggctcagtgtttcttctaaatatagtactgaggcaagtcatgtaaaagccgtaaaagcgatcaatgtcttggccattgaatatgctatgaagcatcctgaagtattaaaaatcaaaaatttaaaaatgatggtttatattttgattcattcaagtattgctttaacaatgaacttttttacttctgaaaatatgggttttacttttgaagagttagttgactgcttaattaatattacgatgtcatacatagaagatgatagaaataaagtcgcttaatttacgttcgtcaatttatgatttttagcgcctaaatgtatgccaaattaaaggcttccatctatttatcataaaaacaacaaatagaatgaaagcctaaaatttgaattacaatttagaatgtatttttaataataacgtcgtcgtaagggagtttgcccacgcgtggataaggttctgaagcagatttaccaaccgcaatcattaaacacaccacgtgatcttcaggtaagttaatgagctttgccattgcatcaaagtcaaaaccgtccattggacagctatctaaaccatgctcttgagcaagtaacataagggtttgagcaaagatgcccgcactacgcatcacttcgtcacgttgggtttgtgggcggtcacggtaatactggtcgattgcaccaaccataatatcttgaacttctggagaagctccatcccatacacgtttagcgtcaacttcccatgtatttactttggcacataacacaatcagtaatgatgactctgttacttgtggttggtcccaagcaatcgcgcgaattttttgtcttaactctgcatcttcaacaatgactggacgccaatgctgcaagttaaaagcgcttggtgcatttgctaaaacttcttgtaataactgcttcttgtcatcttcagagagttgaaaagcagggtcgaagcgtttaactgcacggcgtttgcggagagcatcaataacattcataagattttcctacttgagagttgggtagccgtagtcgttagtttttataacgttgggctacttcagccgaagagaagtttggtaataatgtcatacgcgatttttcaaaattattccattgattttcatctttcagcacaggaattgtaattgtttctttacgatcaaaaccaatcagggctgcatcgaccaaatcattgacatccattaatggcggaacttggcttaaatctatacctgaacgttcccaaatttcggttttagtggcagaaggcaataccgcttgaacgtgtaccccatgatcttttaactctaaatgtaaaccttggctaaaaaattgaataaaggatttacttgcgccataaatggtagaaccaaattcaggcgctaagcccagcacagagcctaaattaataatggcgcctttacctttgcgtataagggattgcgacattgcatgagacaatcgcaccaccgcagtcatatttaaagttagaagtttttcaatctcattacgatcttgagttaaaaagtttccgttcagtgcaatcccagcattatttaccaaaatttcaatatcagcatcgtttttgagtacatcttcaattttgcgtatatcttgatcgtttgataaatcggcttgaatgaactcgacctgtacgccgtatttttcttgaagatcttttgaaattttatctaaacggttggtatctcgtgccaccaagattaagtgatagccacgttgagcaaatcgatctgcataaacagaaccaattcctgacgaagcccctgtaataagtacttttgattgaactgacatgtgatgtctccacgctttgatttttagatgatgatcataatctaaaatatatgggttttgatgtcaatcataatcaatgtataataatgacgagcaaggtgaataaaagtgagcgcaccaacatgaaagttagtaaaactcaggtaaaagaaaaccgagataaaattgttgaaaaggcgactcaactgttccgtagtaaaggctacgacggggtgggcattgccgaattaatgtctagcgcaggctttactcacggtgggttttataaacatttcagctcgaaaacagaccttgttactattactgccaaacatggtcttgagcaggttttaaaaagaatagaaggtttaaacttaccccaatttattcaaatgtatgtgtctcgtacacatcgggacaaccgagatcagggctgtaccttaacagcgctatcttgtgatgccgctagacagcccgacgaagtaaaagtcgagtttgaagagggcattgagcagcttattgagttcattatgaatgaacgcgcaaaacaagtttctttagaaacagaagagctgagaaagcaagctattaatattcttgctcagtcagtaggggcaattgcattgtcacgtgcatgcccagaccaatcaaaccttagcgatgaaatcttggagagctgtagagagagtcttttaaaattaaccgattaagtttttttatcttttaagctggtttgactaaactgaattaatctcgctatatcgactgttcgctcataaatgagttctgctgcatgttcgcaggcgtgttctagggtgatggggccattggctagtgaaaaagcggcgcttacgccgtgctcataaagtgcttggtagccttcacctaaagttcctgtaatcacaatgaccggaacattgtgggctttggcaatttggcttatcccaaaaacggttttaccgcttaaggtttgttggtcaaatttaccttcacccgtaattacccaatctgcgttagagattttatgctcaagctgattcagttcagccacaactttaacgccagctttaaagtctgcatttaaataacttttggcggcgaagcccaaaccaccagcagccccagaacccgcttcatctcgtttgtcgaaacctaaaagttgtgccgtgacatcggcaaaatgggcaagggctgcatcgagtaactgtacttgagcaggagaagcacctttttgtgggccaaaaatatgtgatgcgccgtttgggccacaaagtggattggttacatcggcagccagtaaaaaccgtgtgtgctgaatacgtgagtcgaaatgtgttaaatcaattttggataggtggctaagggcaaggccgccagcgggtaaaacgttttggttagcatcgagtaaaactgcacccaaagcactgagtaagcctgtgccgccatcattggtcgcgctgccgcctacagttaaaataatgtcttttgcacccgtgtctaaggcatccaaaataagctggcctgtgccaaacgttgtgctgtggcaggcatcacgctcagacggtggaaccaactgtatgccactcgcttgagccatttcaatcatggcaattttttgtttttctaaccatccccatttggcctgaacaggctgacctaatggtccaaccactgttttttcacgccattgtccatcgcagacttctaaaactgcttcaatggttccttcaccgccatctgccattgggcacaaaatcgtttctgcatgaggaaatactgcttgccatccttgggcaatggcttgagctacctttaaagcagataagctatctttaaatgaatcaggggcgatcacaaccttcataaatgctctaatgcagataaatttttaattgttttatactgcttaatgcgaaaaaaacatagataaagtcgtgtaagtgtcaattttaaaaagctttcagtcggttaaaaatgaaacccaataatgtttttatctgtaaaagatagaattaatatctatttaaatcattgttttgtatttttttatgcaaataacgtggttggcttgaattattgtaattgtaaagaatatggcacatattataagaacggttgagccggcttttagcatagtggcaataatataaaaagtggactctactcatcggtaaacagcgggtagctttgataaaaccataattaaattgtgatttcactgagcctgttgagtgtaaaaaagataagaggatgaaaaagtggataattcagaagaacaaaagcacatacaggaaaataacggttttgcgcgaattgagccatatactcatcctgctggcgggtggggtgcactgctcagtgttgctcgtaacttaaagcgacaagatattttaggtaaaggttcaattaccttactcaatattaaccagcctacaggttttgactgtcccggttgtgcatggcctgaaaagaaagatgctcatgcctttaacttctgtgaaaatggtgcaaaggcggttgcttttgaagcgaccagtaaaaccgtcactcccgaatattttgcagggcataccgttagttggctatcagaacaaagtgactttttcctagaagacctaggccgcttaaccgacccagttcgttatgatgctgcaaccgataaatatgtgcctatttcatgggacgatgcctttaagctcatcgctcaacatttgcatgcgctagaccatccagaccaagcggcattttatacctctggccgtgccagtaacgaagcagcatttttatatcaattgtttgtgcgaagctttggtacaaataactttccagattgctcgaacatgtgccatgaaaccacaagtgttggtttgctcgactcgattggtttaggaaaaggcacagtcaccttagaagattttgatttagccgacgccatttttagttttgggcataacccgggaaccaaccatccacgtatgttaggtactttgcgtgaagtgtctaaacgcggcggcaacattattgcgattaaccctattaaagagcgaggtctcgaacgtttccaagacccgcaagcaccgcttgaaatgatgaccaatggcagtacgccaattagtcgctattatttccagcctaaaattggcggcgactatgcactgatgttgggtattttaaagcacttacatgagtgggataaaaaggcccttgcctcgggcaaaccaagcgtttttgaccgaaactttattgcagtcaataccgttggtttcgacgaaatgattgctgaggtagaaagaacggagtgggcagatctttataagcactcaggtctgtcacctgaacatttagaaaaactggctaaactctttttagagtcagagcgttcaattttctgttggggtatggggattacccagcatcgtcacggaactgctaacgtacatatgctggcaaatttattgttggcacgtggtcaaattggtagaccgggtgcagggctttgtccggttcgtgggcacagtaacgtgcaaggcgaccgcactatgggcattaatgaactccctagcccgaaacttctcgataatattgaccgtgtgttcggtattaaatcaccaagaaaaaatggatatggtgtggttgaaaccattaaagccatggccgaaggtgatatcaaagtctttattggtttgggcggaaactttgccgttgcaacacctgacaccgcttatacacaagaagcgcttagaaaatgtaatttaaccgtacatgtggcaaccaagttaaatcgtagccatttggtgtgtggtaaagatgcgcttattttgccatgtttaggccgtaccgaaattgatgagcagcttcatggaccacaagctattacagttgaagactcaatgagtaatgtccacttgtctgcagggcgtaatactccaatttctaaaaatattttgtctgaacccgatattgtggcaagaatggctgaggccgtgctgccagagagtcagattaaatggaaatggtacattgaaagctatgaccgcattcgtgactcaattgccgatgtgtttgatgaattccatgattttaatttacgcgtttataaacccggcggtttccatttagaacatccagctaatcagcacatctggaatacaaagagtggtaaagcgcaatttctaattacgccacttgaagaagtctatgcggataaagaaaatcagtacgctgctgcatataccgaaagtaaggtttataccttaatgaccacccgttctcacgaccaatacaacaccactttatatggtctggatgaccgttaccgtggggtgtttggtcagcgccgtgtgttgtttatgaaccaagccgatattgatgaagcgggctttgaagcaaatcagtgggtcgatattgaaagtgttttctcggatggtgtgaagcgtattgtgcatagtttccgtattgtgccgtacaacattccacgaggcagcttagcggcttactatccggaaaccaatcctttggtggccttaagcagtcatgataaatatgccaagattccggcttctaaaagtgttcctgtgattttacatcccggaaatgcgccagagcattttaacttggcaacagccgttgaccctgaagatgccaataagaaagtcagcagtctttaagtgaatctgattttttaaaatgaaatttaagcaaaaggcgctctaaacaagcgccattttgaagtaaaggaaataattttgacaccacatgcttatggggttgaaacattgccagtacagcggtttaacaaaaccgaatctgaaaatgtcttagatcatattgtgcaagagtacccaattgccttggtatataacggtatttcgcatgcggtgatgatggcgacaccgaccgatgtcgatttatttgctaaaggttttagtctctcggaaggaattttaaccagcttaaaagagctatatacccttgatgtgcatcaaaatgaactaggcattacggtggaaatgaccatttcatcgagagcatttgccgccctaaaggaacatcgccgtatgatggtaggccgtacaggctgcggtttatgtggaattgaaagcttagagcagtttcagttagacgtgccaaaaattacaacgcatgcatcaaaaatatggcttgagcaaattccgagtgctatttcccatttaaaaactcaacaagaaattactgctttaacgggtggggcgcatgccgcagcgtgggtagttgacggtcaaatcgtggctttatttgaagatgtgggccgccataatgccttagacaaattgctcggttatttagcgcaagaaaattacgacaccagtttaggttttgtggtgatgaccagtcgggcaagttatgaactgatacgaaaatgtgctcagctcaatattagcttgcttgcttcaatttcagcgcctaccagtatggccattcagttagccaagcaatcgggcctgactttggcaagcttttgtaggggcgatggatttgttttatatacggaaatataaaatatgtcgtttaatatgagtgaattagggctgggttcattcgatattcctttcacttttaagctaaggttagtttttatagattattataaaattctaaaggttcagagtctgtccaaatgtcttgggtacaatcaataaaagaatgggcaaaacgtctaaaaaaacaaattattatgctttggtttgcctcaaggcatcctcaaatgccgtggttacccaaaattattgctgtggtagcggtggcttatgcgtttagtccaatcgacttaattccagactttattcctattttaggcttcattgatgacgcggttattttacccatactcatttggttagcagttcgttttacgcctcagcaagtcatttttgatgctgaacaacaagctaaagaatggctagatgaacatgaaaagcggccaaaaaactatttggttgccgtacttattattttaatttggctcacacttgccgtgatggcttacttttattttggcggtggtttgtaagtgaactgagtcttgaaaccctgtgcgaatttaatacccttaacattgtactttgccacaactcaaaggataataacgtttttataagctatgggttgcagaccatgaaaatcgtcgcagatgaaaatttggcgtttaccgattactttttttcagagtttggcgatattcaatataaagcagggcgcaccttaacgcatacagacgtacaagatgctgaagctttattggttcgttcagtcaccgcagtaaatgaaagtttaattcaaaataccgccctaaaatatgtgggcagtgccacaatcgggaccgatcatttagatattcaagctttagaaaagcagggcattacatgggccaatgcagcaggttgtaatgcacaggcggttgctgaatatgtcattacagctttactgcatttagatgctagccttttagaacaacaagaaaaatttacgctaggcattgtggggcttggcaatgtcggtaagcgcttggcctatatggctcagttgcttggttggaaagtgattggcttcgacccctatgtacagttagattcaattgaaaatgtaagctttcaaaccttgttgcaacaagctaatgcagtttcaattcatgtgccgctgaccaaaaaaggcgaacatgcgacatatcatctgtttgacgaaaaagcttttgcagcgcttcaaccgaacacgattttaattaatagtgcacgtggtccggtcgtaaaagaagccgctttaatcgaagacattcaacgtacccagcgtaaagtggtactcgatgtatttgagcatgagccagtgatatctgaagagcttttaaatatgttggcgttggcgacaccgcatattgcaggttatagcttggaaggaaaagctcgtggtacgcaaatgatttatgaagcgttttgtcaaaaatttggatatgacattaataagcgtttcgaaacccagttgcctgcatgtgaagactatttttcaggacatgatttaaaagcagtgttaaagcaaaaactatctcaaatttatgatattgctcaagatgatgccaacatccgtgcctgtgttaaagagggcaaggtagagcaaaaagcatttgatttattacgtaagaattatccgctgcgccgtgaatgggcagctcacgggggaccacaggcatgagtttaagttatcaacctacttgttcaattgatgccttaaaggctcgtgccaagctttatactcaaatccgtcagttttttgcagaacgtgaagtcatggaagtcgaaacaccaatcgtttcacaagcaggtgtgactgacgtacatttagcctcagttcaggcgttacgtcatatcaatggcaaattgcagactcagtatttacagacttcgcctgaatttgccatgaaacgtttactggcaagtggcagcggaccgatttatcaaatctgtaaggttttccgagacgatgagcacgggcgcaaacacaacagtgaatttaccatgcttgaatggtaccgtccgggtctggacttaaaagcgttaatgcacgaaacagccgatttattacaaacctgtttgcagcatcgttttggcgaagttcgtccatttattttaagttataagcatgcttttcaggaccgtttagatattaacccgttgcaagcgactttgaagcaacttaaagacacagcaaatcgtgttgggttaaatctcgacttgggcgatgaccgtttagcttatatggatttgttgttttctcattttgttgaaccaagtttagggtttgatgcacctgtctttttaactgactttccaccagaaatggcatctttagcgaaagtgaaattagatgaagatggggaagaggttgcagcgcgttttgaggtttatatcgaaggcttagagctagccaatgcttacgatgaattgctcgattcagacgtgttgcgttctcgctttgaagcagataatgcagagcgagctaaacaaggacttcatatcatgccattagatgagcacttgttagcagcattgtctcatatgcctgaatgttcagggatcgctttgggaattgaccgattactcatggttgcaaccgatcaacttaaaattgaaaaagtcattgcttttccagccgaaattgcctgaaaacaacgaaataaaaaagcacaataatgtggctttttatttagaacttatttaagttaggcttgttgaatacctgcaacaacccaatcttgctgtgaaccaacaggttttacaaagtgccagatttcagtaaatggctgtggcaagctgtttaaatcttcacttactgtacctgtgaaacgtacgctcacaatgtattgaccattttcagtcgcactgtctacaaccattgcatttaagttactaaactcagcaacgtcctgatcttggttctccatgatgtcgttatacatagagttataaagttcaggggttaagtaacgacgaatttcttcaatgttacttgcactattgattgactgaatgtggttaaaacgctgacgggcaacgcgtaagaaagaagcaggctcactaccatctggtaattggttaccgctattcgtcgttgcgctaccaaaaggagcttgtgttgctgcaccgccacctacagattgaccaaagatattggtattatcacctgtattggttggagctgccgagcggccaaatgggttttgaccgccattatttggtgcataagggttattagctgctaatttttttttgatcccaatttacggaatacaaagaaagctacagcggctgcaagtaagacccaaagccagccaggaataccaccttttttctcttcttgggcttgaacagcttgttcattaccaggttgagttacttggtgttcagctgatgttgatttgtcatctgctaaagcatttgctgcaacagcacctacggcagcaccagccacaccagcggcaaccattgaaccaacacctggaccagatctctgaggtgctgtagcaggttgttgaactggagtcacttgacgaggttgttgataagactggcttgaagtagtagaacgtgccataccgtggcttttaccaccacctgcacgtttagcttcagcaagcggagaaattgctaaagcagccattaaaataccggtaatcaagccacgctggtgtacttccataggaaattcctgtttaaagttaatttgtaatagtatttatgcaggtatttactctaaatttcaaccttaaaagtatgtttttttatgtcaattcatcactgagttgcatcgcctcagtcaaggcttcatgcaggcgggcaacagcaatcacttgtacgcccggaattgctttttgcggggcattacctcttggtaagatgacgtatttaaagccatgttttgctgcttcttttaaacgttcctgaccattaggtacagggcggatttcacctgaaagcccaacttcaccaaaaactgcaagctgctgaggtaaggcttttgttcgcaaactcgaagcacatgcaagtaaaacagccaagtccgaacctgtttcggtaatttttaaaccacctacaatattgacatacacatcttgtccggtggtttgtacacccccatgacgatgcataacagcaagcaacatgtttaaacggttttgttcaagaccaagtgcaacacgtcttggttgtccttgagcatcatcgactaaagcctgaacttcaactaaaagtgggcgagtgccttcacggctaatcatgacaattgaacctggaatggcttcgtcataacgacttaagaaaatagcagaagggttagccacttcacgtaagcctttatcggtcatgccaaatacaccaagctcattgactgcaccaaaacggtttttcactgcacgaatcattcgataacgtgagtctgattggccttcaaagtaaagtacgcagtccaccatgtgttctaaaacacgaggacctgccaatgcaccttctttggtcacgtgaccaacaataaatagcgctgtgccactattttttgcataacgggttaataacgcagcagattcacgaatttgtgaaaccccacccggcgcagattgaagcgtttctgtgtaaagcgtttggatagagtccaaaattgcgacaacaggacgttcttgttctaaaacttcacaaatgcgttcgacacaagtttcagccatgacttttaactggtctgttggtaggtcaaggcgttgggcgcgtaaggcaacctgtgacagcgattcctcacccgtaatataaagtgcagaactttttgcacttgccatgtgagttgctgtttgtaaaagaatggtcgatttaccaatacccgggtcaccaccaatgagtactacagaacctgtcaccaagccaccgccaagcacgcggtcaaattcgctaatacctgttggtaaacgggtttcatgagaaacagagactttattaagcgttgtaatattggcgacttgacccgcataacccccaactttaggacgtgcacgatgagcagtagtgggttctagtttgacttcattaagacaattccattcaccacactctgaacattgacctgcccattttagatgatcggcaccacattgctcacaacggtaaacggttttgactttgctcatattcgacttcagtgagataacttcataatcattaaaagcagagtatagcaaaaagcccaatagagaacttaatcgatatggaatacattttgcttaagcttcggtgagcaaaattaaagagtaaatgtcatgttttaaaaatagagagataacgtagtactcagtcaaatttcgagaaagtattagaagctcgagagggaattgatagttaaaaagttgatcaattgatatggctttttaatttaaaaatcaaagtggttcaagtcttaattttagactgaaaagtgcgttgtattgctaggttcttgtgcgtattatcggatttaattgtatgtatcttgaaattatcagcaatacagacaaaaattggttagctgaaaagttgtcaaaaaatatacatttaaaagatacctgcaaatggtgcgatatcgtctttttgatttgattttagctaacggactaaaaaaattactggagtgtattcataaaatgtcgaatcaaaatctgagcgaccctcatgaacaaggtgagctccatcgtagtctctctaatcggcatttacagctgatcgcgattggtggtgccatcggtaccggattatttatgggttcaggtaaaactattagtcttgccggaccttctatcttatttatttatatgattattggtttgatggtgttttttgtcatgcgtgcgcttggcgaacttcttctgtcaaatttaacctataaatcatttattgatttttctaccgatttaattggcccatgggctggttacttcgtgggttggacctactggctgtgttggatcacgattggtatcgccgatctgtctgcaattatttattacttacagttcttcaataatggcttacctttctcgcctgttgaaggcgcaatgattagtgttgccgcgattgtgttcattatgggattgaacttactaacagttcgattgtttggtgaattagagttctggtttgcacttattaaaatccttgcgattattattttaattgcagtgggtctgtggatgatctttacaggctttacgtctactacaggtgaagtcgcttcatttactcatctttgggcaaatggcggtttcttcccaactggtgtgcatggcttcttggccggtttccagattgcaatttttgcttttgtgggtgttgaacttgtgggaacaacagctgcggaaactaaagaccctgagcgtaatttgcctaaggcgattaactcaattccaatccgtatcattattttctatgtattggcgctactcattgtaatgtcagtaacaccatggaacagaattgatccggcgatcagcccatttgtaaacctgtttagtcaagcaggggtagctgcagccgcgattttgatgaacttggtagtattgtcatcagtcatgtcatccatgaacagtggtgtattctcaacaagtcgtatgttgtttggtttatctcgtgaagatcaggggccaaaagcttttggtaaacttaacagacgtgcggtaccagcaaatgcattgtatttctctgctgcgtgtttattgttaggtgcagcattacagtattttgtaccaaatacagttgaagcatttacgcttgcaacaacactttcaacgattctcttcatctgcgtgtggttgcttattatctggagttacatccgttattacaccacgcgtcctgaactgcatgccaaatcaacatttaaattgccgggtggcttatttacatgttggatcacgattattttctttattggtatgatttacgtattgtctttagagccagacacttttaaagcgcttaaagtcagcccaatttggtttgttattttgatcattggttatttcttcttctataaaccacgtcataaaaaataattaaatttatttggttatgatcaaacgctggctgaaaagctggcgttttttatgcatattgtttttctattcaagtttactctttagccgcttgcctgatcacggtatactgcatcgaattgtttaaatcaggtgctcagatgcgtcgtgtcatttgcctcatcagtttattgagcagcagtattttgcttagcgcttgcggtcagtcaggagcattgcagctaccttctgatccaaattatgacaaacgtgcaaaatacttgctctatcgtaataaagaacagaaacaagttgtgcaacaagatgaacaggctgaacagtcagtcgaatcatcagcagctcaaccacaaactacatcaccttaagctttgaaataaggacaccttcatgagtttcacccgcattaatggagtattgcatgcagagcaatgttctctagagcagcttgcgcagcaatttggcacaccgttatatgtttattcaaaagcagcttttgaaaaacattatttagatatggatcgtgcctttgactttattgatcatcaaatctgttttgcggtgaagtcgaactcaaatatagctgttcttaatgtcttggcaaaacttggtgcgggttttgacattgtgtctggtggtgagctagcacgtgttttaaaagcaggtggcgatgcttctaaaattgttttttcaggtttaggtaaaactgaagctgatattgaaacgtcattaaatgtaggtattgcctgttttaatgtcgagtcttatgcagagttggaccgtattcaaaaagtagcagctcgcctaggcaaaaaagcgcctatttctttacgtgtaaatcctgatgtcgatgcaaaaacgcatccttatatttcaacaggattaaaagaaaataaatttggtattccaagtgatgcagtttatgaaacctatcaatatgctgcatctttacctaaccttgaaatcgtaggtattgattgccacattggttcacagctcactgaaactaaaccatttgttgatgctttagaccgtgtcattgtgatgattgatgagttgaaaaaactaggcattaatctaaaacatatcgatatcggtggtggtttaggggtttgttataaagatgaaacaccgccaagtgttgaagaatatgcaaactctatgaagccggctttagaaaaattaggcttgaaagtttatatggagccgggtcgtagcatcagtgcaaatgcaggtgtacttttaaccaaagttgatttgcttaaaccaacgacgcatcgtaacttcgcgattattgatgcagcaatgaatgatttaattcgtcctgctttatatgaagcttggatggatattcaacctgttgtaccacgtacagataccgaagaaaaaacttgggatttggttggtgcaatttgtgagacaggtgatttcattggtaaagaccgctcacttgcattacaagaaaatgacttgttgactgtacttggtgccggggcttatggttttgtcatgagctcaaattacaacacgcgtggccgtgcagcagaagtcatggtatcaggtgaaaagagctatttaattcgtgaacgtgaaacggttgagtcgctttgggaaaaagaacgtttattgcctgaggagtaaatgagatgttattagaatttaccaaaatgcatggtttaggcaatgatttcatggtggttgatctaattagccaaagagcttatttagatacagcaacaattcaacgtttggcagaccgacactttggtgtggggtttgatcagcttttaattgttgaaccaccagatgtacccgaagctgattttaaataccgtattttcaatgcagatggttctgaggttgagcaatgtggtaatggtgtgcgttgttttgcccgttttgtccacgaacgtcatttaaccaataaaaccaacattaccgtacaaaccaaagcgggtattgtaaagccagagcttgggcaaaatggttgggtgcgcgtaaatatgggttacccaaagtttctgccgaatgaaattccatttgttgccgaagagccaaaagctttatatacccttgagttggcaaatgaccaaaacattagtattgatgtggtcaacatgggtaacccacacgcggtcactatagttccagatgtactaaccgcggatgtagctggtattggtccgcaagttgaatcacataaacgtttccctgagcgcgttaatgctggtttcatgcaagtgattgatgacaagcatgttcgcttacgtgtatttgaacgtggtgtgggtgaaacacttgcgtgtggtacaggagcttgtgctgctgcggtaagtggcatgcgccgtggtctacttgcgaactctgtagaagttgaacttgctggtggtaagctacaaattgaatggcaagaaggcgatgtggtctggatgactggtccaacaactcatgtatatgatggacgtttggatttacgttatttccaaggttaatcgcatggcctaaatagaagcctcttttcatcagttaacgtgataaaagaggctttcttttatatgtacaatattttttgattttattaccttttactcaacgccaatttcaaagcaaatagaacaaaaatactgcccgtaattcggtccatatattttacaaacttgggttgctttagatagcgcgaaagtggctgcatagccagaattaatagacttgaccataacacgccaatcaccacatgaatcattactagccccatcacccaagtaacagccgatgcttgcgctggaatgaactggggaagaaatgaaatataaaaaatgccaacttttggattgagcaagttgccaaagaaacctttaataaaccaattctctgaagtagagcgatttgaatgattgtcttgtatatctgcgagctgactacgaggttttaaaatcatatttaaacccagccatgctaaataagcggcgcccatccatttcaatatattgaatgctaagtcagatgccatcagtagggcacctagaccgcatgccacgacaatgccccaagcaatacagccaagactaattccaagagctgcttgaaacgctttagactttccttcaagtgttgcagtacgaataattaaagttgtatctaaaccaggggtaagggtaagtaaagtaatggcaattaaataaggaatgagtatggtggtcatggtgtaaggtccaacggatacttggtataaattgtaatatataagttagattcattatgctgtgcgatatcaaattttcctgattaaatagtttttggtacactcaaaaaaatgggcaaataaatggagagcaatttggattttgcattacaactgctctcaatgtggttaaaagaaagaaaaattcaaaaccagtctgagcatacaattactgcttatgagcgagatgttaaaagcttccttgagttttgtgagcttaaaaaagttgatttaagaaatgttgaagcttcagatttacgtgaatatttggctcaacgtgtcgaacaggaccagttaagttcaagtagcatgcaacgtcatcttacttctattcgtcagtttatgaagtgggctgaacagggcaaatacctagaaattaatcctactgacgattttaaattgaaacgtcagcctagacctttaccgggcatgattgacatagaaacggttaatcaaattttagatcaacccatgcctgaaaaaccagttgatcagcagctttggttaagagataaagccatgttggaactactgtactcaagtggtttacggctcgctgaactgcaaggcttaacgattaaagatattgattttaatcgtcaactcgttcgtattacaggtaaaggaaataaaacccgtattgtaccgtttgggaaaaaggcaaaagaaagcttattgaattggctaaaaatttataatatctggaaaggccattttgaccaaaatgcttccgttttcatttcacagcgaggcggtgcattaacccctaggcaaattgaaaagcgtgtaaaacttcaggcacaaagagcgggtgtaaatgtcgacttacacccacatttacttcgacattgttttgctagtcatatgttatcaagtagtggtgatttacgctcagttcaagaaatgttaggtcatagcaatttatcgactactcaaatttatacacatattgattttgatcatttggcccaagtgtacgatcaggcccatccacgagccactaagcattaagccgctttaactggaataaaaagcagaatgtagagatcatttgtatttttttacaaatttgtttaaaagaaatcgatgaaattacccaattgaccattttgatctttgcacattttgtcggcatatatagtctaaaaactataaattttgactcatttttgagagtcttatccctctgactaataaggtaaataagataaaaagataataaaaatcaatgtataaaatagactttaaaaagaataaaataggagttagatatgtataaaatttttttatgaactgatgatttcattttttttgccccgttccagaaaattgtgacttgaccgaaatgccaaacacattgcaagatagggtacctaaaaaattttaatcgaagagttaatatacttttctcaacatttacttttgctagaacagccgaggattacatgaaggctcttgttgctgtaaaacgtgtggttgatgccaacgttaaagttcgtgttaagccggacaatagtggggttgaccttaccaacgttaaaatgtcaattaacccattttgtgaaatcgcagtggaagaagcggttcgcttaaaagaaaaaggaacagtatcagaaatcgttgttgtttctattggtcctaaagaagctcaagaacaaatccgttctgcaatggctttgggtgcagaccgcggtattttagttgaaactactgacgaaattggcgctctagaagttgctaaaatcttaaaaggtgttgttgacgctgaaaaaccagaacttatccttcttggcaaacaagcaattgatgatgactctaaccaagtaggtcaaatgcttggtgcattattgggcgctggtcaaggtacgtttgcttctgaagtgaaagtggatggcggtaaagtacaagtgactcgtgaaatcgacggtggtttacaaactgttgaacttgcacttcctgcaatcattacaactgacttgcgtttaaacgagccacgttatgctgcattgcctaacatcatgaaagctcgtaaaaaaccgcttgatactaaatctcctgctgattacggtgtaacagctggtacgaagcttaaaacgattaaagttgaagcgcctgcagaacgtaaagctggtgtacaagtgaaatctgtagatgagcttgttgaaaaattgaaaaatgaagcgaaagtgatctaatacggaaggataaaatcatgagtattttagttatcgctgatcacaacaaccagacacttaacggtgctactttaaacgttgttgctgcagctcaaaaaatcggtggtgatattactgtattagttgctggttcaggcgctcaagcagttgctgacgctgctgctaaagttgctggtgtgagcaaagtattacttgctgacaacgctgcttatgcaaaccaattagctgaaaacgtagctggcttagttgctgacttggctaaaggttacaaatacgttttagctgcttctacaactactggtaagaacattcttccacgtgttgctgcgcttcttgatgtaagcatgatcacagacattatttctgttgaatcggctaacacattcaagcgtccaatttacgctggtaacgcaattgcaactgttcaatctgacgaagcaatcattgttggtactgttcgtggtacagcatttgatccagttgctgcggaaggtggttcagctgctgttgaaacagttggcgaagtaaaagatgctggtgtttctaagtttgtatctgaagaaatcgttaaacttgatcgtccagaattaacagctgctcgtattgttgtatctggtggtcgtggtgtaggttctggtgagaactaccacaaagtacttgacccattagctgacaagcttggtgcagcacaaggtgcttcacgtgcagcagttgatgcaggcttcgtacctaacgacttccaagttggtcaaactggtaaaatcgttgcacctgagctttacattgctgtaggtatttctggtgcgatccagcacttggctggtatgaaagattctaaagttattgttgctatcaacaaagacgaagaagcaccaatcaacagcgttgctgactactggttagttggtgatttgaacgctgtagtaccagagttggtatctaagctttaatctttattgattaaagttaaaaacccctagttttgaactaggggttttttgttttagagtctgaagttagaagtaaaaattagaaaatttaagctttggatgtttgatttttataaaataaaattcacatagttttgattaggcatgaagataatgattgcagctaaaagagtagaataatatgcaattaaattatacaaatatcaccagattggcagtgtagattccgcacattacagagcgcttttatgctatagtatacagctatatttttttcgattttagttcactttccggaactaaattttttgcaagatcaagacatataaacggatagaaatatctatctgtaagaaggagtatgcatgagcgtatcggaaatccgaccgattgccattgaggacgaactcaagcattcatatttagattacgcgatgagtgtaattgtatctcgtgcattgccggatgtgagagacggtcttaaacctgttcaccgtcgtgtgctttatgccatgcacgaattgggcaatgactataacaaagcctacaagaaatctgctcgtgtcgttggggacgtaatcggtaaatatcacccgcatggtgacttagctgtttatgaaaccattgttcgtatggctcaagactttagcttacgttatttattggttgatggtcagggtaacttcggttcgatcgatggtgatagcgctgcggcaatgcgttataccgaagtccgtatgactaagctggcacatgagcttcttgcagatttagaaaaagacacagttgactgggaagataactacgacggttcggaacgtatccctgaagtacttccgacacgtgttccaaacttgttaattaacggtgctgctggtattgctgtaggtatggcaactaacatggcaccacacaacatgacagaagttgtgaatgcttgtttggcttatgctgacaatccgaatatctcgattgaaggattgatggaatacattaccggccctgacttccctacaggcggtattatttacggtaaatcaggtattgttgatgcctaccgtaccggtaaaggtcgtttacacattcgtggtaaataccatttcgaagaagatgaaaagacaggtcgtacaaccatcgtctttactgaaattccatatcaagtaaacaaagcaagagttattgaacgtattgccgagttagtaaaagagaaaaagcttgaaggtatttcagaacttcgtgatgagtctgataaagaaggtatgcgtattgcaattgacttgaaacgcggtgaaaacgcagaagtcgttgtaaataacttattcttaaatacccagcttgaaaactcattcagcatcaacatggtttgtctagacaatggacaaccaaaattgatgaatctaaaagatattattgcggcatttattcgtcaccgccaagaagttgtgacacgccgtaccatgttcgaattacgtaaagcacgtgaacgtgggcatatcttggaaggcttgacagttgctttagccaatattgatgaaattattgaaaccatcaaaacttctgcaaaccctgctgaagcgcgtgagcgtttacttgcgggtgagtgggcaggtggtggcgttgttgcactacttgaaaaagctggtgcaatttctgttcgcccagatgaaattgaaggtgaagatccaaatcgtccatttggtttaagtgattcaatttatcgtctgtcaccaacacaagtaggcgcaattttagaattacgtttacaccgtttaactggtcttgaacaagacaagttacatgcggaatatactgaaattttaggtcaaattgctgaacttactgcaattttaaatgactttaacttgttaatgggtgttattcgcgaagagttggcacaagttttacaacaatatggtgatgcacgtcgtaccgaaattgttgaatctcgtgtggatttctgccgtgaagatttgattcctgaagagcaagtggtattaactgtttcacaaacgggttatgcaaaaactcaaccactttcagactatcaggcacagcgccgtggtggacgtggtaagtctgcgacttcaatgaaagatgatgactttattcaacatctgattgtggcatcgaaccatgcgaccgtactttgctttaccaacgtgggtaaagtgtaccgtctgaaagtttttgaagttcctcaagcatcacgtggggcaaaaggccgtccaatcgtgaatttgttaccactagatgcaacagaaaccgtaaccgcaatcttgccgttaaccgagttcccggaaaaccactatgtgtttatggcgacagcttctggtacggttaagcgtgttgagttagaacaatttgcaaacattcgttcaaatggtctacgtgctattgaacttaatgaagaagataccttaattggtgttgcgattactgatggtaatcagcaaatcatgttgttctctaacgaaggtaaagcaattcgttttgctgaaactgacgtacgtgcaatgggtcgtacagcgaaaggtgtacgtggtatgcgtgtaagctttgcaagcagcaccttaagtgaagaagatgcagatgttgaaaatgatgattcagatgataatgatgattcagcagattcaagtctagtaagtcgcatcgtatcgcttgttgttgtacctgagacaggcgaagtactgtgcgcgagtgccaacggttatggtaaacgtactccagtaaatgacttcccgaccaagaaacgtggtggtaagggtgttattgcgatcaagacaagtgaacgtaacggtgagctagttggtgcagtttctattgatgaaaccaaagagttattattaatttctgatggtggtacgcttgttcgtacgcgtgctgcagaagttgcaatgacaggccgtaatgctcaaggtgttcgtctgatccgtttaagcgaagaagaaacgctcgttggcgtagtttcaattgaagctgtagaagacgaagaagaacttcttgaaggtgaagtagatacgactgaaactgatagcgaagaagctgtatctaataatgaagatacttctgaagagtaaaacgttttaaaataaaaaaaggaagcttcggcttccttttttatttctggtttatttcgagggatggaaaataaacacatcatagtttctgtaatgcaaagtttttactgacgggtctttagttgcaaaattatgaggttgacttatcacgatcagatcttgtttttgcattagagcatcttgaagctgctgttcgctccacaagtactttttgagttgcggttcaaataacaaaccatctttaatttctaaagaggcactatctgaatgtacagtatcccattggtttacgatataaacgggctgcttaagttttaaaaggaatggaacatcatagaaataataattgtagaaaacgatttttgtagatggggcaatgtactcagcaaaatctgtttggcctacattgtttttggtatctaaaatacgaacagcaaatgggactgcactacatagaacaattaaacttataaaaatataggtcaaatatttcaatttctgttttttatatagcccaactaacacaagtggaagcacaattaataaggcaccaatgagataaataaatatggcttggttttggaaaaaaggctgatgtgcacgaataaaatgtggtgttgcactaacgccaattccaacaagtatagtaaatacaggaataccccaagtctgcaatctggttttattactgctttcaagaaccttattcatcacaagcgcgaagaaaatggcaagaggcggaacagcaggtaaaatatagcctgctagcttagaaggcggaatagagaagaaaaccgtaacagaaacaaaccaccatacaaatagggcaagtaaagagcatgatttataatctttaaaaatggtttttatagacgtaaatctactcgcaaaaagccatggtaaaaaactgacaaataaaataatcagataaaaacaccatggctgtttgttattaaactcttttgaactaaaacgattaaattgttgatcaataaaaaaatagtgtaaaaattgaggatatttactttgtactaagtagagccacggactaacgatgagtagaaataacaagatagccaatggattaagaagagaaggtattttcttccattgcttggtgtaaattaaccacggtaaaagaatcatcccgggaattaaaatcccaattaaacctttgcttaagaaggctgctgcaccagcgatataacctaaaaataaaatagatttctgtgcagaaatggtgaagtcaacaaaacataaaacactaatggtgatccaagaggcgagcagtaaatcatggttaatatattggctactaccaaaaaaaagcaggttagtggctaaaataataacggtaagttgtgcaacgctttctgaaatatgcttttttacgaataaaaataatcccactaacatgagggtaccagccaaaacaggtactaaacgtaacacccatacatgcacaccaaaaagctccataaacatagaacttaaccaatgtagtaaaggaggcttatgcatgaaaggtaagccatcgattcgtggagttaaccagtctccagattcgaacatggtacggctaatatctccatagcgaccttcatctggtacagataagggtctaatccaagacaaaacaaatagccaaatcggtaagaatattaataaaaatttggaactacgaagccattgctgcatacataatccttaatgttggaatgcaaaaaaacggttaagtaaaaaagtcaccatagatgtcagaacaattgcagtacacactaaggttgaaacaggtacgttaaaatagaggtttgaaagtaaaagaaaactttcattaaataaaaaacctaagccagcaaccaacgtgaattttgggagagtctgccgatgcgtaagatgttgcgctttaaacgtaaaaacgcggtgcccaaaatagctcacccaataggcgagaagaaaagccaataaattggcatattgcagtgcaacatgtttcttaaatagaagcatggctacactataatgagtaagtgctgctgcggtccctgtagtagtaaaccgtgcaagctgaagaatatgagtaaacattagaaactagagaacgtattttcttggtgggtgattgaatgttcctgcttagtacgagaatgttcggtagaaataatatattttgggcggtttttaacttcagcataaatgcggccaatgtattcacctaaaattcctatgaataacaattgaatgccacctaatagcgtcatacctgccgcaagtgttgcccagcctggaatggaaattccctcaatcaaagttttaatgataatccatacgccgtagctcatcgcacctaaggctagaattgcacctaagtaaatacatacgcgtaaaggtaaatcagaaaaacccgttaaacctgacatggctaagttaaaaagagattttaagttgaagctagaacggccatgttgacgttcttgctcagaaaaattaatgcctatacttttaaagccaacccaagcatataggcctttcatataacgatttttttctggtaactgtttgatggcttcaacaactcttgcatcaagaagtcggaaatctccagcactttctggaatatcaataggtgaacttaagtttaaaatacggtaataagcttgggttaaaacacgtttaagccatgattcggttgtacgattacgaataccatagaccatgtcataaccatttttccaaagattaatcatggttggaattgcttcaaatggatgttgaaaatcagcatcaatcagtagagcaacttcaccagtcacatggtctaaaccggcacttaaagctgcttctttgccaaagttccgtgaaagctccagcacaactaaaggataatcctcaatcattgtttgtaaaattggaatggtatcgtctttacttccatcatctaccacaataatttcatagctaagattttgctgttttagactatttgctaaagcaggaataaaggtttttaaattctctgcttcgttgtaggctggaacaacgcaggataaaaagggttttatattcattgcattgcccctagtctggtgagctggataccgtattgttgacaatcaagttggaactgatccgaactgaagtattgatattcttgaattcgggcgtgttgaattggatcttgatcctttgattgtgcaagtgctggatggcacataatcagtaaatggtcttttgcattcgcaagccaatattgattgagttggccataattggtcagtttgaaatcatagatgccagcaaattggccattttgattaaagtgatatgtctggcaagcttttgccaaagagttagaacctaatgctgagagcatacgagttttaaaacggtaatgagggggattgatcggctgttgtaaatttcgaatccaacccgtaaattttttctcttttagtaattgcagcaaaatatcacgtataaatggaaattgatgaatatgttgatgaccatctataaagtcaggttgttttcctaatactgaaacaaataagtcccattgctcctcaatacattgagtgattaattcgcgattaagacttgcagaccatgctcggactataagcataggtaagggaaaaaccagattacccgaagcgaaagtatgggtaagatttaaatgtaaaccgatatcaactcgatcactaaacggttttaatttggcagcagcagtttcccataaatcagattgggtcatacatgaggtggcttgaagcgcaccttgttcaataagttgaataattgcgtcagatatttctgcattcattgcaaagtcatctgcgcaatagcacacctttgccatatctaaattccaccatagggcagggttacagaattattctgcttagctgctgaaaaactatacgtttttaatatggagaaatttccttaattccaacttaaagttttcttaaggttttatgacaattgatgtaaattaattatttgaatttatttaattttttataaaatttaagtcaatttttttaagaaataagctttaactataagattttatagtaaataaaaatataatctgtacactttgattagcctataaataagtttatttaaatacttttaaacgtgaataggcagtaattaaaaatataaccccaatagtcgcaagaaaaattaatttcgggaccacgacatttaaaggcacgcccatttgattaagttgtacaaacatctgtacgccgtgtgtagagggtaaacaccaagcaaaccattgcaaccattcaggcatggcttgatgaggccaggcggcgccagttaataagaaaagaggaactgagctaaatacaataatatgtccggcacgttccggcatatctaaaagtgagccaatcagcatacctaatccaattacacagctaataaaaataggaacagcgactagcaaaccgacaaagtttccaccgtgtggatagtcattgaaccacaaggtaaaaccaaaaagataaaaacttcctaaacaaccaattgtaaagatactggcaaaaattcctgcaaaacgaataggggtaattttttcatgttgttcgcggtaacttgcaaccagcatggccagtcctaacacaattgtttggtgaataataagtgatgcaactgcaggaaaaatataactaccgtagcctgaaagcgtattaaataaaggcatttggtgaatagaaagagcaggctggaagtgtgtacgttgtccaaacctttcaatatattcctttaaggttgcttcaatagaagtggcaagacctaacccaatttctttagtttttaaaaagttggttgtgcttaagtataagccgattccgccagtttctccgcggcgtaagctcttcgttaaattgcttggtaaaagtaaaataccatcggctttttgttcgcgaaccatttgttcagcttcaagaaaattagcagtgacatcaacaattttaacgtgagggctattggctgtttgaccaatgacttgagaagttaaaagactttgttcttcatcaacaatgacaattggaattgattctgcgcgctcagctttataggctgtcggataaaaaaagctataaagaatgacggataaaataagtgttgtgaaaactgaactgttactcacaatatctttaaatgtttgaacgtaagcctttaaaaattccttcatgatgttgctccttgaaccagttttttaagcagcaaacaacttaaaaagaaataaataaggcagtagccaataagtattaagaagggagacatcgaaatgaaaagtggacttccaatcacccattgttcggtctggagctttgcataaggggtgtacggaataatcagtgaccaaaatttagtgaaaatcggtgcattatttaaaggtagagtaacgcctgcaaaacttaaagaagatccgccatatactgcaataaaaccaaaagttttacttaaatttttggtcgcgagaatgacggtactactaattaaagcataagaaaaataaagtaagaactgagcagctaataagaaacttagtgaacctgctacaaaccagcctcgaatttcaaccagccaaaacatccataaccaagtccagaaacagaaaataaagctatacagcaaatttttagacaataagccttgaataaaactctctcggttcacccactgtgttagtgtgccgcgtttaatttcttgtccaatagcaaatgccacacagcaacatagtaataaatgtaatacggctggaaccatgaagggttctaaatagaactcatagctcatgcttgggttataaagcgttgaaattttgacgtgtgctgtaggtacatctaaatagggaatattatttgcaagataattctggccagcatagtctgctaaagcattgagagtgctgactaacatcgccgaggaaatcgtgttcccgacactaaaaaaagattggttaaaagcaatactgatttgcgcatcttgagctttcacaaaacgtttttcggcaccatccggaataaaaatataaccccatattttggtttcattgagtaatctctcggcttcacttgagcttgtagtaattgtttttacatcgactgtatgatttagcgaaagatactttccaatattacggcttagttcactctggtcttgatcaataatggcaatgggtaaatgttcagctttacctgcataaaacatgctgctaaacaaaaaaatgataaaagcagggatgagtgtcaccatacacaaatcccatttattgcttcttaaatattttagttcacgtaatatgctggcaaacatgttttatttttcttctttaattttaaatagaacactcatgcccacttttaagtctttgacaggacgctcaggcaccaaatgtaatttaaaactacgaatatcataaccaccggtctgacgtgtggttttaatggtggcaaattcgccttcggcatcaatatttttcactttaaacatcacactttgattcagtgcaggaatgaaaccttccagcgttttgtttttataaacagaagcgtattggttttcaccgacatttaaactgacccacaaatcatcatcttctaaaatgctgacaacaggtacacccatagcaacgagttcagaaggtttgccataagtttttgaaactgtacctgaaataggagcgagtaaacgagtttctgcctcaagtgcttgagcttcacttaccgcggcttttgcaatctcaacttgtgcatccgctgtagatttctgctgactggtacttccgcgctttgctcgagcatattgttgataagctgcttcacttaactcttgagcagaagtctgtgcggctaacatctcatctcgtctttgacgagaaataacaccttgtctatataaattttctccacgttgataagtggttttagcaaggtttgcctgtgctttcatactctgccaattggcataaagagtatcaatattttcctgttgagagcctcggtctaccgtagattgaaatgccaaagctgattgtagggtggctaaagcttgttgttttttagcttctatttcagggctaactaaacgaacaaggggctgacctttggaaattttctggccctcttgcacataaatttcttcaatacggctcggaaccttagtactgacatgaactgtttcagcctcaactcggccttgtaattcaataggcttaggttgatagcttttccacaaaccaaaaatgattaatcctaatagagcaataaccacgaccgcaataattagtttaattttcgaatttttaggaggttgagaatcacttttactcgtttttacttcttgagtattgtcggtttgagtattttgctgattttggtgagtttctgccgtacccgcaacaggagaattttgttctgaatgagctgagtcttgattcatgttatgcccccattagcgaatatagtcagtgtgtggttgagtcacataagctttaaactggtccatagaaccatggctttgcaacagagttgcgagcgacatgacatatttataagcatttaaagccatttctgtttttaaagcacttaatgcattttgtgcatcgatcacttgagtcgctgtacccatgccttctcggaaagaaagttcctgaatacgtaggttttcttgagctgcgctgatattcctttgtaatagcgtatgactttgctgtgctgaattgagctcgttataagacttattcaataatgcttcaatctcttgtttagttcgttcagtcatgagttctgaagcataacgttttaactcggcagcatgaatattcttatttttatctacgccagaaaaaagattgtattttgccataacacctacaatccagttttcattttcatcgagtgaatactcaccaaaagcgaaaagactgggtttttttgctgcttgttgagcctgaatatttgcatttgccaattgagtgtctaactgcattttttgcacaaggctagatttttgagagtaactgcttaaaagagattctaacgattggctacgaacagtatttacaaaaagaggagtacttaaatcagcattattttgctggtgcaaaagattgtttaaattaaattggctagcattcagatttgcctgcgcattttgtagagttcgttcggcattgttacgagcaacttcaaactgcatacgttgccctttactaataaaaccttgctgttcgagctttaacgcattgctgtaatgtttttgcattgcattaaagttaaatagactacttgcgaccagttgttgttgtaattgcacattaaaataactttgtacgacttcgaagcgctggatatcttgttgttgttggcttgaaagctcggagcgttgagcctgaatgttagctattttttttgcactagttgttaacccacctgtgtagagcggcatcaccactgaaatagatggtcggactacttggtcttctacagtcaaattagcgtagtcaggaaaacggtttataccgtcatgtatgatttggtttgagccttcctgaacttgacctaaaacatctgatggaatgacattgttccactgggataatttatcattgagtccttggcttaaatcattttcaagtttttgtttaaaagagcctaagggtacatctgtttcactatgaaaagcatatgctctcacatttaaatcaactctggggagtcctaaaccttttaccgcttcggcttctaactgagaggcttgttgtaatgcttggttggcttgagtgctgtatgagctttttaaagcctgttgttctgcttcagcataacttaaactttgcgcataaataggcgttgcaattaatactcccaataccaacgcaaggtaattgggtttaaacaaaaaaggacgtttagactgtcgatattgatgtgttggcattttatataacaatttttgatcatcccttatagtttaaatttcttgttattaaattcaattatcatattgtttattatacaattgtataaaagcacaaaatgattttgaggttatttttgcttgatggaaaatcatacagcaagtttttatatgttcaccacagtatgggaaactatattcacaagtcaagttgaactttatttaataaaacttataaaaaaataagtgaaagcaatgaaataaataaaatagttattgaaaaaataggcataaacacgccctagcattgaaatatttactagagaagctgctgcaaccttaagcaatctgtggttaaatgcctttttttattgtgtttcacttttacaagggaaaaatcatgcgcgcgtacaatttctgtgctggtcctgctgcattacctactgccgttttagaaaaagctcaacaagaattgttggattggcaaggtaagggtctatccatcatggaaatgagtcaccgtagtgctgactatgttgctgttgcggaaaaagctgaagcagatttgcgtaagctcatgaatattcctgaaaactataaagtgctatttttacaaggtggcgcgtcattacaattttcagcaattcctttaaacctgcttggaaaaaataacaaagcagattatatccatactggaatttggtctgaaaaagctttaaaagaagcaaaacgttatggcgatattaatgttgtagaagctggtattaaagtagacggtaagttcgccatttctgagcaaagcgaatggaacttgtctgacgatgcagcttatgtccattatgccgataacgaaacaattggcggtttacagtttgctggtgttcctgatgttaaagcaccactggtatgtgacttctcatcaagcattttatctgctccacttgatgtttcgaaatttggtctcatctatgcaggtgcgcaaaaaaatattggtcctgctggtttaacaattgttattatccgtgatgacttactggatcaagctaaagcagagattccaagcattttaaaatatgctgatcaagccaagaatggctctatggtaaatacaccatcgacttatgcttggtacttgtctggtttagtatttgaatggttactagagcagggtggggtagatgctatccataaagttaaccttgaaaaagctcagttactctatggttatatcgattcaagcgacttttataataacccgattgccattccaaatcgttcaattatgaatgtaccatttactttggcagatgaagcattagaaaagcaattcttgaaagaagctgaagaaaatcacttattgaacttggcaggtcaccgctcagtaggtggtatgcgtgcaagtatttataacgctgtaccattagaaggcgttcaggcgcttatccgctttatggatgattttgctaaacgtaatggttaagtcataaaatgaataaagccctcaaaaagagggctttatttttatataaatgatcaattaaaaaggcataaaaccaaattgatgtatcataattgcggctaagaacatacccaaaacgaaaaagcaaaacgcaccagtatcgacccttatacgtgggttactagtttgaatgaggctggtggtttgttcaggtataatcttcattcaatagcctaatttttaaaatattagtgaaattcaattagtttcactatttttagcataaatattcgcctgaatccagatattgccacgaatatattcgccaatattaaagtttttgtacaaatcattttttgtagcaatgcgcactaatatggcaggaaggttgtcttctaaaactaaagtgacatcataaagggtatattctgcacccataaatgacattgaagttttaccgacaatattaccttggaaccaagcttcatcttcttgaccaagattttctccatataaatatgcaaccattttagaaaaatcaaccgttacaggttcttgatcttctttagtttttggttgccattcattaatcagttcttgtaggttttcgggtgcaattccattatgttcagttaaaatcgcatttaatgcacggtgatgtttaattgacgctggatcatctacgacaattgtttctcccgcaggcactgattctaattcataggcccatgcattaaattggacttgataagtttgggttttgtcatattggcaacgattaacgctaaataaattatcaaatgcataaatcgttgtacttttatttagttttaaacttaatactgcttgagtagcagagtcacaagtaatgatgcgctcaatttgggcattatattgatagggactatcaaaactagggaaggcagtttttaaagcacgaggtttttgattttcaactgcaataatttgattaatggtgaccttctgaccttgtggaccttgaatgagccaaaaagattgatccatttcgtcttcattttggcataaacccattggcattacaggagcatcaagcgctagtccaagccattttggtacatctgtctctggatgggaagtcagtagattccaatgctctccatgactaccaaaattttggtcgtttaccgtaataacttctggactgttttgatttttcataggtacgattgatgttgggtttatctcacttgatatattaaatcgagggtaattgctatttttcaagtcaacatatgtaaattctcttgtaaaagcacgtatttagttattaaaaagttctccacctagcaaaacatgtgctgttaagagtacatataaataatcattaacgtattgttcaaattaaatttaaaaaacaagttttatatttagcgctattctctaataaaatgcatctgttagacttatatttttagtggaaatagagaataacgtgctgccattcaagttgtgggtagacgcagatgcattacctaaaattttgcgtgaagtcattttaagagcttcggatcgttatcaattagaagtgatttttgtagccaatcaaaatgtcggtattaccccttcagtgcgtattaaatctctgcaagttttaagtggagccgatcaagccgatcaggaaattgtgaatcgtatgtctgaaaatgacattgtcattacgcaagatattccactcgcagctcaagttattgagaaaggtggtattgcgattcacccacgtggtgaggtgtataccacagcgaacgtaaaagcacgtttgcacttacgtgattttatggatacgttgcgcggcgctggtgtacagacgggtggtccaccacctatttcagaacgtgataagcgcgaattttctagtgcactagaccaaacaattttaaagcaaaaacgtaaaactgcttagtgagtctcttatgccatcccaaaccaacttggcttcaacttatgtcttgcttgtatttatctgggcaacgacacctttagccattgtatggagcgtatctgacttacatgtcatgtgggctttactgttacggttttatatagctttgcctctgtcggttattgttttacttgttctaaaaacttcttttccaactcataagcaagctttacatagttattttgcagggtcttttagtttaatcggctcgcaaatttttacctatgctgcgacccaatatttaagttctggcatgattgccttgatgtttggtctagcgcccattatggctgggttgattggacgttttgcttttggtcagcatctttttaaattgcagtggctaggtatggctgttgctgtttgtggactagcgatcatttgtttaaatggttcaaatcaacatgtgcatccatttggcattgtcttaatgttggtcagcgtttttgtttattcattttctatattttgggtaaagaaagtgaatgccaaaattcagccaatggctcaggcgactggttcgatcttggtttcttcaattttggcaagctgccttattccatttatttggcaatatgcaccgactcatttaccacaagctaaatctttatttgcattaatttatacagttctgatggcttcacttgtggctatgttctgttatttcaaacttgttcagaatataaaaccgaccactttatcgttaacgacagtcattacaccaatgctagcaatgatcattggagctgttttaaatcatgaacaattgtcgattatggttttcgtgggagctttcattatcttatttggtctatttctatatttttataaagacattcaagcaaatcgtaattttgctcaacatattaagtctaagtaggagaagatgagggtaatttgttgagcttattcattaaattgttctaattcgtagctaaatgcatgatcaaattgatctcatatcttaagtagtagaaaatagcccagcaatataatattaggattgttaaggatagatcagaacttactgatttttaagccttaatacagcatctaacgatatggctaaataagaagtgtgaatgaacacttctctttttccatcaatgaccttggatttagaaggtatgtttaaaccaatctcactgtatatagggttgagatatactcgcgctcgacgcagtaatcattttatttcttttattgcattggtttcgatggtcggtttgacacttggtgtcgctgtactaattacggtactttctgtaatgaacggtttcgaccgcgaattaaaaaatcgtgttttgggaatggtaccgcaagcgacagtttcatcgacgcaaatccttacggattggcctgaactggttaaacgagttgaaaatcatccccacgtgacaggagttgcaccttttacccaattgcaaggtatgttaactgctcaagggcaagtggcaggtattatggtgacgggtattgaccctaaatatgaaaagaatgtctctatcattcaaaaccatattgttgccggtagtctagactcacttaaaaaaggtgaattcggtatcgtacttggtaaagacatggccgattcgcttggcttacgtttaaacgatagcgtgacattggttttacctgaagcgactccatctccagctggtgttgtacctcgttttaaacgctttaaagtggtgggtattttcagtgtaggtgctgaagttgactcgatggttggatacattgctttatatgatgcttcaaccttattgcgtttacctgatggcgctcaaggcgttcgtctaaaattagatgacatttttgccgctcctcaagttgccgatgacattgtgaaaaatttgccaagcaatttctacgcaaccaactggacttatacacatggcaacttatttaatgccatccaaatggaaaaaacattagttggtttattgcttgtactaattattgtagttgctgcatttaacattgtttcgtctttggttatggtcgtgactgacaaaaaatcagacattgcaattttacgtactttaggtgcatcgccatctatgattactaaaatctttatggtgcaaggtacggttattggtgtgatcggtacagttgcgggtacggttttaggggtaattctggcacttacgatcagcgatattatttcttggtttaataatgttctcgggcttaatctgttcgatgcctattttgtacattacttaccttcttacttaagatggcaagacgtgacaattattgtgattgtttctttactcttaagtttcttggcaactatttatccggcgcttcgtgcagccaaagttcaacctgccgaggcattgcgttatgagtaaagtcgttttagaagcaaaagatatttataaacattttgatgacggtaaatctaaggttgaagtcattaaaggtctctctttacaagtggaagcagggcagtttgtatctattgtcggagcaagtggttcaggtaaaagtactttgttgcatgtacttggtggcttagatcagccgactaaaggacaggtatttttgaatggtcagcactttgataatttaggtgaagcggaacgtggctttcaacgtaaccaattcttaggttttgtttaccagttccaccatttattacctgaatttactgctcttgaaaatgtagctatgcctttaatgcttcgagcagacagtcaatataagtcggtaaaggcacaggctgaatatttgctagatcgagttgggctatctcatcgtatggaccataaaccaggtgaactttcaggtggtgagcgtcaacgtgttgcacttgctcgtgcattagtgactaagcctgcggtagtactagctgatgagcctacgggtaacctagatcgtaaaaccgcagtaggtatttttgagttgctcaccgatcttaagaaagaactaaacatggcaatgttaattgtgacccatgatgagcaattagctcaggcagcagattcaatcttgcatatggaagatgggctgtgggtaaacggttcttaaaaaaattgtcattaaatcacattgttaaagcccactgagttgggctttaattttgcccctaaaatgataatgactagatttttaaatgtttaagattattctattggggtggattggcggtattgcattgatgggaatagatttccctttaatcatgcaatatgaaaaagtgggcgaggctctactgttacttgcctttattttttatctttataaacgaccaatgttcgttgatcgaccatttttaaaggcagtgttttgcttattatgtacaacaagtctttttatggttggttaccactatgctgaaaaagcactgattgaacgattagaacaaagagaaacggatacccgaaatctcgacattattgtttatataaaccgtttaagtgaagaaaaagataataaggttcaacaaactgcacaagttctaaatttttctaaagaaccggtgaattggttgctatatttaaaaagtaataatcaaaatttattaaagaataatcagaatcttgaattaggtcactattatcgaatatctggaaaaacaagacctgcgcatagttatgccaccccaggagcttttgatcaggaaaaatggtttattcagcgaaatattatgtctggttttaatgtgagatatattgagcctttaagtctcgatgaaatctatcgattgggctatcagcaacatttaaaagaacaacagtctttttccaatagttttcgtttaaatatagaaaaacttcgcttaacttttaggcaaatattaaacagctcatctctacagcaaaagggtttaattttagctttgctgacaggtgatgaaagccttttatcagatgaaactcaactacagttcaaacaattaggaattagtcatttattggcgatctcaggcccacatgtgctcatttttgccattatgttatcttgggcatgtcatcaatttatcagtcgttattatcctcaaatttacttatggaaaccgaaacaggttttgatggctgtaccatgctgccttggtgttttaatttatactgcatttgtaggtttcgaaattcctgcactacgaacattattatcagcatttatatttattggatttctattattaaaacaacctattaaaccttttacattactcgtatatagcgcaagtctactgttgctaattgacccgtttagtgtgctttctgcaggtttttggctgtcttatggggcatgctttattttattaagaatttaccaaactatagcgcagctacctgagcaacagtttttaagtctgagctcaaaaatgatttttatgggtaaggtgttaattgagtctcaaggcaaaatatttattgcattgagtcccttaaccttacttttctttcaacaaatttcttgggttgctccattaaccaatattattgccgtgcctattgttggtggtgttattgtccctttaaacatcatggctgcttgcgcatggtttatagtaaaaccgtttggaaatatgctttttcatttcaatgatatgttgctcagcatattgctgagttgtttgggcttattagaaaaactctctttaccattacaaggtataagcttgacgccactgtctttattagcgattagttttgccataattattttatttttacctaaaggaattctgcccaaaacttgggggatattatgttgtttacccttagttattatgaacaaaacgagtcaacaaattcagcttaatattttagatgttggacaggggcaagccatttttttacaacattccgaacaaaactggttaattgatacaggcggttcttacgatgaaaaaatatttagtattggacaaaatgttgtagtgccttttctacgtcagcaaggcgtaagacaattagatcatgttgtgctatcccatcttgatcaagaccatagtggcgcgtttcctcttattcaacaagagattcctgtaaagcagcttatttcgaatgaacaattaccaaatgatttaaagcaaccattccaatattgccatcaagggcaacaatggcattatcctgagttagatattcaaattttatggcctaaagaaaaagatctggcttttgttgcttctaaccagaatcaatattcttgtgttgtatatcttcaatttaaaaaagttggtggttaccaaaattttcttattatgggcgatgcaggatgggaagccgaatacgagttattaaaagattatcctaacttgaagatagatgtgttggtgctagggcatcatggaagtaagcacagttcggcttatgatttcttggcgaccttaaaacctaaactggccattgcatcggcagggtttgataaccgttatggccatcctagccaacaagttatagcacgtttaaaagctctacatattccgctaaaaagcactgtggaacaagggaccttaagttttgtgttggaaaatcacaaaatagttttacatgaccgacgtttggataggctctggttgagtagaggtttttaaagcttctgctttgagcctatctacaattttaagtgcttctgtcggatcgatattatagatattgtctaaagcagggttcgctttaaaacgtttatagctccagtgatagtgttctggatattgataaatgagttgctcaatcgcttgatggatgacatacgttccatcgtccgcagtgccttcatagattttctcatccattggctcgatatgcatggtaaagccatcgttttcattacggattgcataaagaaacagagcttttgctttagttttctggatgagttttgcacttaaattacttgaagcaagtggaacgccaaaatagttcaccatatctccacccacattaggggtatgatccggcaaaattactgtcgtttcaccttgctttaatgctttaaaaatttgtcttacaccgctttcatcggtagggacgagattcgcttgttcacggctacgggcttctcgcacaaaacggtctgcatcagcatttttaacgggtttatataaaatggtcattgatgtgaattgagcacaccatgcattcatgacttcccacgtaccaaaatgtggaacaataagaactacacctttttttgcagccaatgcttcatgaaaaaaatgttcaccttcaatacggtgaatgcgtgagatatttttactatttgatgagccccaaatacttaaaaactcaaaatatgaagttaattcgtttcttacagctttttctgtaatcgctatacgctgctgaggtgttaaatacggaagcgcaattcttaagttaagctcaatactttttgatgttctagtaatttttagagtatttacaagtcctgctaacagacgagcaagaaaacgcccaaattgaatgggttggcggctaaatgttttgagtaattgatagttcatgctttttgaatctggtctagtcatctatagcagtaagtaaggaagaaacaacaagtaaaaaaagacaaaaatattataaatgaaatcatattatttagacagtttttatcaaatcaacgtatataatgacatcatttcgattgatttggattggaattttatgtccgattggccaccaaaaccacaaaatgaacctataacccctaaacagaacggaccggaatggcaaatccttgagaaagctgtactggcttctgtagaagaacaacgccgtagtcgtcgctggggtatattctttaaaacacttacttttatttatctattgttcattatcgtcttaatgggcaaaggctgttcgaccactaaagatggctctacagcaagtagtagcagtgctcaccttgcagtagttgatattattggaactattgatgcttcaagcaatcaggctgtgaatagtgaagatacaaacaaagcgcttaaacgtgcttttgaggcatcgaatagtaaagcaattgcccttaatattaattctcctggcggttcacctgttcagtcagatgaaatctggcaggaaattcgctatttgaaaaaagagcatcctgacaagaaagtctatgcggtaattggcgatatgggtgcttcgggtgcttattatattgcttctgctgccgatgaaattattgtgaatccatcaagtttggtaggttcaattggtgtcattatgccaaactatggcattactggtttagctcaaaaactaggaattgaagatcgaactcttacagcggggacgaataaagacattttaagtatgacaaaaccgattaatcctgtacaaagacaacatatccaatctgtactcgataatgttcatactcactttattaacgcagttaaagaaggacgtgggaaacgcttaaaaactaatgatcctgctattttctctggtcttttctggactggcgagcaagcaattcagttaggcgtagctgaccgttcaggtaacattacaagcttgatgcgtgaactgaagcttgataataaagttgactacacgattgaacgtaacccattacaatccattctagggcgaatgggatcagaaatggggaaaggtttaagtgagtcggttgctgaacgcttacaaacaagtcaggacgcaaaactacaataatttaagcaggataacggtatgtcagtaaaaccggttatacactttgcgcatgccaacggcgtgccatctatggtgtatcaaaaattgtttgatcaattaaaagatgagtatgacgtaatttatgttccactcattggacctgacaaacgttatccgattaccaatcattggccttttttggttgatcaggtaattgatagtattgtacgtcaagcgaaggggcgaaaagtgattggactgggccattcactcggttcagttttaactttaatgtcttcttttagacggcctgagttgttctcacaagtgatcatgttagatccgcctcttattttaggtagatattcttttgcttttcatatggcaaaattatttaaacccaaaatagttgatgatatgacaccagcaggtttatctgcgcgtcgtcgcgagcattgggaatcacgtgagcaagcagctgcattgttacgcccaaaaggtttttataaagactttgatgaagattgctttcaagcatacattgactatgctttaaaagaagactcggtacgtggtggtgtaacgttaactatttcccgtgaagatgaagttgcgattttccgtaaaaacccttcttggtggtggttacctatgccaaaaccgaaaatgccagtacatttagttgtaggaaaagagagtgccttcttaaaaagaggttttcctcaaatggcaaaacgtaaaatggggattccatttagtgtagttgaaggagggcatatgttccctctagagcatccgattgatacagtgaattatattaaggaacttattcaccgtaattcacgctaataaagctttcgcaaaaaaaggacatgcatgcatgtccttttttaattgacgttaagcaaacttttaccaagatgcaaaacggatagggtgttcaagaatttgattgcggaaataggcttgtccatttttccatgtgagctggccattacataaccactctgcaacttgaggataaataaaatgctcaagtttatgtacacgttcggccaaggatgcaacattgtcatgttcttttacttcaatggcagattgagcaattgcttgaccagcatcaagttcagaagtcacaaagtgaacggtacagccatgtaatcgatcccccgtatttaatacacgttgatgtgtattaacgcctttataggcaggtaataatgaaggatggatattaagcattttaccttgccatttgttgacaaagtcagcagttaaaatacgcataaagccagctaaaataaccacgtcagcttgccatgcgacaagttgctgatgcatagcttcatcaaaatcttcacgactaggaaagtctttgtgagagattacggctgtcgcgatattggcattttgagcacgctctagggcataagcatcggctttattagacagtacacctacaatttgccctgatagatttgcatctatcaaggcttgtaagttgctgccgttcccagagactagaacagcaattttcatcattcaaagatcacacgaattttttcgtctgcaccttccactgattcagcattttcttggatatgtccgattttccaagctttttcaccttgagcattaagcacttcaattgctttttctgcatcatttgcatcaacagcaatgaccatacctacaccacagttaaaggtacggtacatttcaaaacgttctacattgccttcgcgttgtaaaagtttgaataattctggccattcccaagaagcttcattaattacagcttgagcaccatttggtaatacacgtggtaagttacctggtaagccgccaccagtgatgtgtgccatcgcgtgtacatcaacttgtttgcaaagctctagaactggttttacataaatacgtgttggctccattgctacatctgcaagagggcgaccatcaattacttgagttaagtctacattcttaacatctaagattttacgtagtaatgaataaccatttgagtgagcaccgcttgatgcaacaccaataagtacatcaccagattttactttagagccatcaataattttgctttgctcaactacacctacggcaaaaccagcaagatcgtaatcttcgccttcatacatgccaggcatttcagctgtttcaccacctacaagtgcgcaacctgcaagttcacaacctttaccgataccagtaactacgtttgcagctacatcgacatttaagtgaccagtcgcataatagtcgaggaagaatagtggttctgcaccacaaaccaaaagatcgtttacacacatagcgacaagatcttggccgattgtgtcatgacgattaaggttaagtgctaaacgtaatttagtacctacaccgtcagttccagaaaccaaaacaggttcttcgtaacctttaggaattttgcatagtgcaccaaagccaccaagtccgcccattacttctggacgagttgtacgtttagcgactgacttgatacgatcgaccagtgcgtcgcccgcttcaatgtcaacacccgcatctttgtagcttaaaccggtatttggggtagaagttgagttgctcataaatgaagtctccgcattggcggcagattataacctgaatatacgaaactcttatgttatttatgctcgaaaatgctatctttaataaaaatatttttccatttataacgattaaatcaaaaaaggctagattttatgcaagatcgtatactgcgccgtattttcttactcgcaggtattgtattgctggtatgggtattatacttgctcaagcctgtggtcatcccatttattggtgcttttttcctggcttatttatttagtccactagtcgaagttctagtaaaaattaagatacctcgctggttggcaattagtattgtttttattggtataggtgtaactttaaccgttgcattatggtacctggttccactgatctggaaacaacttgtttacgctcgagacagtattccagcagggattcattggattaatgcagagctattaccatggatttcttcgaccttccatgtccagcaaatggaaattgataccgatcaaatgtccaaagctgtgatggattatgttcagaccaattacagtgctgatagtattcaagcagttttattaaagcttgcacaatcaggacttaattttattcaaattggtggaacagttgttttaatcccaattattgctttttacttcttattagactgggaccgtatgttacaaaacttacgtcgtctcattccacggccatatgaggctacgaccttacaaatcgtccgtgaatgccatagcgtgttaggagcatttgttaaaggtcagttccttgttatgcttttgctcggtgtagtttatgcagtaggcttacaattaattggattagaggtaggcctaattattggtatggtggcaggtcttgccagtattattccttatctaggatttgcagtcgggattattgcagcggttattgcaagtttgttccaatttggaatggactggacacacttattacttgttggcgtagtctttatgattgggcaggcagtagagggctatattctgcagccattcctactcggtgataaaattggtctttcacctgttgcagttgtatttgctgttttagctggggctcaattggctggctttttaggaatgttaattgcattacctgtggcggctgtcattgtggtgctcttaaaacacctcagagaaaattacgaacggagttcattctatgctccatcttctacattattaatccaagagggtaatattgagcaacttcatgtagaaactgaaaatactaaacttgatcttgaagttaaaaaacagcaagatacagataccccgaatctttcagatcagaaataatttcaaggccaattcattatatgcgtcaactccaactggatatagaacctcaacttgatgcccgaatcagtgatttttcgggaccaggttgggggcatgtagtggatgcagtgcgacaactacatgcgggtctagtaaatagattttatatctatggtggcgcaggaacaggcaagagccatttgctttcagcgatttgtgattcttatttagaggtcggtaaatctgcaattaaagtttctttgcttgaacttctcgatgctccaattgaggcaattacttgcttagagcactatgatctggtggctttagatgatattgagtcaattagtggggtgcctcactggcaaaaagctgtttttcatttaatgaataaccatgaaggacaacttgttttctcttcacgtgttgcaccgattgaattaaaactagagttaccagatttacaatcgcgacttacacaagcagtgagtgtaaaagtgccgagcggaagtttatatgctgaccgctatgctttagtcacttctgtaatggctagacgtgggatccattttgatcagcagattgtagactatttacttttacatgggcctcatcaagcttctattctattgcaaaccgtagcacaattagaaaaactccttaaaggtgagaagactaaactttcaaatgcaacgttaagacaaatctatgctttaattgatgaatatcaacaataataattttctagcttctggacttttaatttattagcctaagtaaactttccttactataaaaatcatgagctatttattcttttaaccttgaaaaatacttttaaatttttataagtaaaattttcatatatcaatagatctttaattgtacaaatatttagaaagttccctatcgaaaatgacgctatagaccgatcaaaacatcttgagaaattctgattcctgtgacaaagtacgcacaaaggatgcgtttgcacaagtggaaactttgcaatattgacaaagaaaaatgaaaaaaataggtaaggagaagggtatgctcaaacggagcattgcttttgcattattggctgctgctgggcacgcttattctgctgatattgaagtcacaagtttagtggatgaagataaagatgatactgtttgtactttacgagaagcagtacagtttttgaattatcgtggttcatctaatgcagctgacgttgaaaaatatgtgaatggttatcatggctgcggaaataaggatgcttcatcaaatattattttacagcgcgataaagaatatacgttaaatagcagaataacgattacggcaccccttacaattagtacagcaaaaaacgattctactttattagatgatcaaccaggttctcataacgcgacaataaaaatggtcggtaaagatcagctatttaaaattgatgatgggaacgttgaaaaagcgtctttttcagtttctttaagcgatcttaatttacaaggagctgggtctaacaataccgtattagaaggaggattaatttataaccatgaacaattaaccattcgaaattcacgtttgataaatggttatgcaacccgaggaggtgcaatttataatgcaggtaatttatccaacacaacaaatacagcaggtacagttagtcttgtcaataatttaatccaaaataataaagcggctcaaggtggaattttatatagtgaaatgccactttattttattactcaatcagttttacgtgataatgaagtcacaacagcagataatgctttattttatacacagactaagttttccgatgaaagtactggagggtatttaacttcacgggctatcggtataagtaatagtacaatttttcataataaaggcggttttattgcaaatgttcgggatgggatgtttgttaataacattactatgattaaaaatgataaaggactatttcttgatgcgcctcaaggtaatgcttcggtttcaaatagtatattagtaggaaatactattaactgtcaggtaagtacgactgataaagcaattatacaaagtaatttggttacagcagagtgtaatcgtaatgctacatcgaagctccctaatattctttatcctgctaatgaaaaattaattgccggtgatagcgatgaaggtgcatgtgatattacctctcaaaccgggttgttgtgtccttacaatacgccaaaagatagttttctaggtttctttaggccacgcttacttgaaagttatcaatctttatctgactctttgattattaataaaggccgtctttatagtgatggttcttcaattggtttagcaagttgtgaaagatatgatcaacgcggtaaaaatcgtagtggatatgatgaactttgtgatttaggtgcgattgaatatattttggatagccaaattgctcctgttggccaagatattaaatatggtcaagttgcaaaatttagtattctgagttctctaagtgaagcagatctggtcactcctacaacctgtaagcgtttattcggtgaacgtcctgatggtaaagaatggcaacctggatgccttaaagttacacaaagtactgatacaccaacttctaaaggtgttattactttagatcagaatggaaatgtagtttatacgccaaatggaaattggcatggtgcggacatttttaggattcaagttgttacgagtgtatctcgttttaatgatggcatagagtttcaatatgtcactatccctgcaactgtagtccaagaacctgtatctggtattgaagataaatctgtgagtacgggtggaggaggaagcgtcggtagtggattaattttaggattatttggattaattgcattacgccgtttcaagtcataaacagggatgaggactatgaaaaactatcaaaaagtactaggagtacttactgttatcgcagcaatgcctttaatggctcaaactactataaaagttacaacatttaatgatgaagataatgagaacatgaatacatgttctttacgtgaagctattacagctgcagaaatgagaaaatcttatggagggtgtgaggttccagcaattgatcaaaattatacaattcaacttgatgctggtacctataccttaaataaagagttaacacctaaaattgctttaaatattattggaaaagaggcgacagattgggagcgtaaaggagttttaactaatgactatcctgctcaaaaacctcttcaaactcgtataaatgctggtggaaaatcacgaatttttaatacagctgtttaccaacaatcgttaactttaaccaatatcattttggaaaatggtaaaagtgctgagcaaggtggagcaatttacgctggtgctgatgtaactttaaaaaatagccagatcttaaactctcaagcctctaaaggcggggcaatttatcttggcggaagtactgctagtttaacaatgaatcattcattagttcaaggtaatggtaaggcttcgactgaaggtagtattttggcaatgagttgcatgtttaataattcatacagtggacgtatcttttcatttgattcaaatagttttattgataatggtggaataaactctataagtatttttgatttttgcggtagtcctacggcgaaatttactaataatacaattgctaaaaatttagcgagtcttactaatggtaatattattaaatttactggagatgctgatccattaaaaaatcaaactagtaagttaagctcatctagtagtttaacattgcaaaataatacaatcgttgagaactctgcatacaccacatttttatacgataaattaggtacaaaagaattaaattttaatatattagcgtttaatacaggttcttatgcatgtaaatatttattaggagcagcggcggctgaaaaagatactggactaaatttgaaatttaatgcattaaacttaaatggtaatactcctaaatgtgatataccgacagaagtaatttctacaggcaatacgaatattgatataaaaaatgaagtttttagtaatttattagaacctttaaaagaagctaatgaaaataatggttttttaccaatttactatcctaaaaataatttttcagcgacagatttaattgatgttgatttggaaaataagggtacatgccaaactcaggaccaacgtggattatcgagattagtaagtaatacgtactattatcaaactctagaaaagagtaaaaatagttgtgatattggttcagttgaattaatgaagcttacagcaggtgacctagaaggtttaagtaatatttcatttacaacattattagaaacctatcaaaaaagttacgacttatatgatagtttgctcaaagatccaacaactccatcaaattttattgtttattataaagtccgtttagctgaatttaaggatttacttgataaatttaagaatgacagcgcgcatataaatacaaaatatcgagctatttatattgatttaaaaaactatggttttccactaccaactgaagattcaaatcatgtattaaagttttttaatacgacggattatagtgttaaagcagagccattaggtgtggggcagaaagtagaagatttaacttcagatactgagactaagaaaaatcaaagatgcgaatggaatcctacggtacagcaaattcttttttatcgtgttgatgatgatattacttcgagtacgacatatgagttttgtaaatatacaattaccactaaaacaggtgtagagcttagtagtggcctaattaaggcgaaatttggaaatataactcctgtttcaggggatggcacgataacattcaaatatttagctaatgaaattatcccattaaatttacttaaatatgcaaatgatgatggtgatggtcctgttggtacgcttgttactaaaccgaataaacctccattttgggtaaatgacaaaggtgtagagttaccaatttatttaccaagtaaaaactcaaaagatggaatttttacagtagtaaaagcagatcgcgaaggtccatgccctggtaaagatagtaaaaatacatgttatggtggcaatatctatattcaagcgaaaaatgtatttaatacctttaatgatacactaacatattatgtatatgatgcagatggaactatctcagctaaggccggaacaattaacttagtaagtacagcaactacaactgatgattcacgtggtggtgggggtggaagtattggaattctttctatcgcatcactactaagtttaattgcttatagacgttatcgtaagtgatgataaaaataaaaagcctccactaggaggcttttttatttgttagtaactttttaatttcaaaaaaagataaatattaaatacggtttttagtgctctaaatatttatttatatattcttcacgtatagcagttctttcatcagcacttgctttgagcatccgttgacgtaaatcattgcgttcttgtgtactcattttttgccaagcttcacgcattttttgcttttctgcatctggaagctggttaaaccaatccatacgttgttgcaagttagcactttggttggatggtaattcctttaaggtttgataacgtttaattacagctcgttgctcttcttcagatagagcattccaagtatcatctacttgcgtattggcatctttcgaaaaaatccagaaacgttcgaaacctgcaaaacttgtttgcaagaaacttaatgaacaaaggataagtgctaactttttagctaccatgttgaactttatcctcacccaacaccatgagcatttctaaatcttctaccatttgtggcgataatttaggatttacaacgacttgattttgtggcttatcaagcatatctattgagtttggtaaaataacaaaaccagtaatcgctgctgcaagtgcaaaaccagtcattttccagacactataataagaggccggtttttgttggatatggtcaagcacatgattcatcaccactgttttatttttatggtgatgggccaaactatcgagtttggatgtcacctttttagtgaaatcatcatgattcattggaacctcccatgggatttaaatgcgctaaatactctctaagtccctgaattgctcgatgataatgggtttttacactaccttcggtacagttcataatttgcgctgtagtatgggtatcaaaaccttcccacgcacgtaacataaaagcttgttgttgacgaacaggtagttttgcaatcgcttcctggatctcttctatggtcactgcttgatctagaaaatctgctggattgattgctttttcatcgacaatatcaatgatttcttcatcatcattgtctagactaactttcttgaagaatgaaaatgggtttgcccgacgtgcttctttgcggcgccaatcctgaagtttattatttagaatagtataaaataggggataccattcttcagtacttcgatcggcgtaagacttgtgtaaagcaataaatgcttcttgaaccaagtccatagcaatgccttgttgtccttgggtagcactttccatcatcactaaagcacgaccagtaacatcttgcatgaaaacctttaggcgttgctcagccgtgctggcatgagcactagatgcttccgatcgagactttttcggtgctaaatccatggagatggaaaatcctgtcattggacgtacccaccttatcttcaatatatctcttatataacgttgaaaagaggtgggaggttgacaacaatcggctattttttagtagtgtaaatgatttttttcacaaatatgagcgatgtaaaataaattaacgttttattggcgttggcgaaccatttcaaaaaaacaaattgatcctgcaatggctacatttaatgactcttgaccacctggctgcggtatagtcactgattgtgcatgttctaaagcataatcacttgcaccttgtccttcattgcctaaaatccaaacacatggttttgaaaggtcttttgaataaagactagtcgagcgatgagagcttgtaacgaaaacaggaatatcgaatttaggaagaatatcggttaattgaaagttttcaaaacaagacaggctaaaatgtgcccccatacctgctcttaaaactcgtggagaccaaagtgaggcagagccttgtgtgcaaataatctgttttatatttgctgctgccgctgaacgtaacaatgtacctacgttacccggatcttgtacattttctagaattaacgtatctacgctatagtcaatggttgatgcagttttcggtaaatcgataatagccaagcaaggaagagtattacctaaagtacttaagtctttatataaaacttcgctaataataaagacatgaccttggtgaagttcaatgattttctttaaatcgggatgttctaaggcttgttcagtcgtaaacaatgaaaagagttttttctgttgttgtaaccaagctagacaaaggtgggtaccttcaagaactgtttgttgatgcttttttcgggcgctattgagttcaattaaaccacgcaaatgtttaatttttgcattgtcttttgattctaaaaaaataaccgccataagggaatatccaaaagggcgtcatcatactatgacgccctgtgtaatttaaattattaatgatagcttgttacacgttcaacttcattcttagaaccgataatcacaggaacacgttgatgaagttctgtaggttcaatctctagaatgcgtacacggccagtagttgatgcgccgcctgcttgttcaatgagcatactcattgggttagcttcatacattaaacgtaaacgaccagcttttttcgggtctttcaagtcatatggataaaggaaaataccgccacgacataaaatacggtgaacatcacccaccatacatgcgacccaacgcatattgaagtctttttcacgtacagatgttttacctgcaagtaactcttcaatatattgttttactggttgttcccaatggcgttggttagatgcattaatagcaaattcttgagtatctgctgatacttgaacattctctgtagtaagtaagaatgtttgagtttctggatctaacgtaaagaaagctacaccgtttccgactgttaaagccatcatagttgatgggccatataacacatagccagcagcaacttgttgagtacctgcctgcatgaaatcttgtgcttgtgtaaccgcatttttggcaggaagaatcgagaagattgttccgacacacatgttgatatcaatgttgcttgaaccatctaatggatcaaatagaaccaagtattcgccgttttcttgtgctggtgtaaaatcatcaagttcttcagatgcaagaccaccgacgtgaggatggacttttaaagcatcgattaaatagtcattagaaatcacatcaagttttttctgtgtttcaccttgaacattttcgttacctgcgctacccaaaattccagccaaggcacctttttgtaaggcttgatcaatggttttacaagtcgcagcaattgtgtcgatgacttgagccaactcaggtgtaagattccctttttcttgttgtaaaaattgggacaatgtgaggttggacataaaaaaacgctcctgtgcgcaagcatcaaaatgagtcagataaatacgtggcatattctagatgagaatgccgaaaaataaaaattatcttactttatttgtgttgcatttatgcttacaagccccattttacgtggtatgttgtttgcataacaaaggaatgtagatttaggagaatcgaaatgacaactaagaagtttgatgcgaccccaacagcaggtgaaccaatcaatttagaagaaatttcgaaagaaagtgttcaggaagcttggaaagattatgaggcaaaacctgaatataaagcttttaataagcatgatttgattgagtcaatgcaacattcagaagaagagcaaaacaaatcttcttaaagtaagaatgtaaaaataaacgcccatatgtgggcgtttattttttgggatgttttattttaatagaggaggaaccgcttcatagttaatttcaacgcggcggttttctttccaagctgattcatcatggccaggattaacaggcgcttctttaccataacttacagcttcaagttgctgaggatttacaccactggtaataagataattctgaactgcttttgcacgacgctcacccaaggccatgttgtattcgcgtgtaccgcgctcgtctgtatgaccagttaatgcaacttttgagtttgcatttgccatgaggaactgagcatgagcctgaagtgtttggtaatcttcagtagataaatcactactgtcataatcgaagtgaacgacgcgtttcgctagggcagccttgtttgcctcagttacaccttttgaagaagcacctgctagattttgagcatttaatgcagcatcttcacttaagccggtcgtatttactgtgcttgggttagttgtacctgtagttgccgttgttgctggcttacgacttgcacaacctgtcatgacaagtgccgcactaagtagaggaaaggccaaatatttaattgatttcatcatcatctccatcaatggaataaaaagttatttaggtgcccaggctggttcacgtacttcaccttgttcactcggtaaattcatacggaaacgaccatcagtggacatgatagacagtaaaccacggttcccttcacgagttgcataaaccaccatttgcccatttggtgagaaacttggtgattcatctaaactggttggggtaagaatattgacaatgcctgtattaatatcttggatcgcaactttatagttactaccacttggtcgatgcacgagtgcaatttttttaccatctgcacttaaagtgccacgagcattaaatgaccctttaaatgttaagcgttttactgagccattcccaaaatcatagcgataaatttgaggagagccaccacggtcagatgtaaaaataaaagcttttccatctggtgtgtaacgcgcttcagtatcaattcccgagtcatttgtcatgcgtttgacttggcgagttgataaatccatttgataaatttcagggttaccattcatcgatgctgtaaatagcattgatttgccatctggtgaaaagcttggtgcaccatttaagcctttaaaactcgtaagtacttcacgtgttccagtagagagatcttgtaaataaatggctggacgtttagtttcaaaagaaacataagcaatttttttagcgtcaggagtccatgccggagacaaaatcgggtcacgtgaagagagaacagttttcggttgttcaccatctgtatcggcgatttgtaaggtataacgttcagcaggagtggcaggattacgtaatacataagcgatacgaccactaaaatcgcctggaattccggttaaggcctgataaatagcgtcacttaccatatgtcctgcttgacgtatgcgtgaagcaggaacatttaacaactcattcagaagatattgctgtttttgtacatcataaagttggtaatggacttcaaacccgtcagctgtttgcttaatttgtccagtaacaacataaggaatacccgcagcttgccaatcagatgcttgaatctggttaatagcggcattcgcaggtaaattttttgatgaacttgtaaaacgtcctgagcggttcaagtcagtttcaacaataggataaagtccattgtcgttattaaaaggcacaatagcgattttaggcgcctgatcaggtgcttttgcaatctctaaatgtaattgagcaaaggcagctgttggtgcaagaggacttaatgctgtaagtagcgttaaggcgagaaggtgtttgcggctcgttttcataggtttaaagtcattgaaggtatttttgtgactggtgattttgtagcatagttacatgcttcaaactatttaaagcatgtaactcttacaaaattattgtgctctgaaagtagaggtaacgcttcgcgcttctcgtcttgcatcaggatccgatggcattgggtagggagcagacgcctgaattgcagctttgatacttgcatccaatgcatcatctccacttgaccgtgtaataacaatcgagctaacactacctgagtcagacagggtaaatctaacgctaacagttttaccactgcttcctgtaggaacatcccaagcacgacgaattttctgctcaaaatcacgtttagccgaagatgcaatttttttagcttcaccttttttctgggcagcttcttcttgagcttttttagcagatgcagctttttcttcggcctcaatttcggctttacgtctagcatcttctgctgctttttgttgtttggcttttgcatcagcctcagctttgcgtttagcgtcttcagccgctttttgctgtttagctttcgcatcagcctcagctttgcgcttagcatcttcagctgctttttgctgcttggcttttgcatcagcctcagctttacgtttagcatcttcagctgctttttgctgtttagctttcgcatcggcctcggctttacgtttagcgttatcagctgcttgttgcttagccttagcatctgcttcagccttacgtttggcgtcttcggcagctttttgttgtttggctttagcatctgcttcggcttttcgtttagcttcttgttgtgcttgaagtttagcgttttcagccttttgagcttcacgttttagtcttgcttcagtctccgctttacgtttagcttcctcagttgctttttgtctagctttcgcatccgcctcagcttttgcattttgttcggcttttcgtttttgttcagcttcagctctcgctttagcctccgcttgacgcttagcttcggcctgttgcttctgtgcttcctctaaacgttgttgctctgcagcttgctttgctttagcagcttcttcagctttacgcttttcctcagctaattttgcttgttgtgcctgctcagctttttgcttttgagcagcaagttgttgtgctgttggaggaggaggggcagctggaagattttgaggaagagtttcatccacaatcgggcttagaacttcttcagcctgattttctgctacggttggttgctcaacttcttttgccaaagggggtggtaaatcttctggtttaactaaaacagtggtcagcttttttggttgttcaggtggtttactcaagcctaaaaaaagcaagccaacaatggcaattgcatgaactccaagggtgaagctcaatgctattgcattttgtttaaaaggaggcttttgatttttattcatagcttattttaaaggctctgtcagaaggccaacttgagttaaacctgcttcttgtaaacttgccatcaatgatacgacttctccataagggcgggtcttatcaccattcactaaaactgtaagttgtttattttcctgctcagcttgtttttgtgcttcacttaaaacagactcaagtttttcaagagaaagtggctcattatctttgtaatcttcatattgaagataaatattgccatctttaccaatcgtgaccatggctggcatatcttttgattcaattggatgattatttgcctgaggtaaatcgactttaataccactggtaatcatgggagcagtcaccatgaaaatcactaaaagtaccagcattacatcgatataaggcacgacgttcatgtcactttttaatggtttttttatgcgctcaaagcgccctgaacgttgaatggccattatgcatcttcctgtgacgaacccacagattgacgttgcaataaagcaatcatctcttcggcaaataatgcacgatcagagtagacactttcgcttttagccgtaaagtggttaaaagccaataccgcaggaattgcagcaaatagaccaattgcagttgcaataagggcctcggcaatacctggcgcaactgtcgctaacgtcacttggtcaacagcagccaaaccaataaaagcattcatgattccccaaacagtaccgaataaaccgatatatggggcaaccgaaccgatacttgctaaagtacctaaaccatattccagactaccctgatcacgacttaaacctacacgtaaaatacgttctgttccttcgatcatttgtgaggtaggagcttggcgttttttgagtttaaaaaactcacttaatccttgataaaagatatcttcaaggcctgagcgttttgaattgagttgtgcgttgttgtaaagcgtattgagttcagcaccagaccagaacattttttggaaatgttcatcatcttggcgtgcttttttataactcatatgtaacttggcaatcaggtaccaactaaaaattgatgctaacaataaaatcagcatgaccaactggacgactggacttgcttgtaaaataaggtcagaaatatgcagggttgattcaatgtttgttgccatagttacatatgccggttgtttttttagtcttgttccaattctttacgaataagatcacgtatttcttccggaagacgacgtggcattagatctttacttaaacatgccaactcaacctcaccagaagcaagcaagatttcaccacgataaatattttgttgcaacacaaatgacgcagctttacatgaaactacacgtgctgtaacagtaattaagtcatccattaaaataggacgcatatattttacgtcaattttatatactacaaagttgtagtctttttgatgccagtaatggtcaacgccagcagcgcggagccattctgtacgggtacgttccatatagcgaatgtggttggcatggtaaacaataccacctgcgtccgtatcttcaatataaacacgaatgttgaattcaaaatgattcgccatgagagtattccgttttagttcactatagagctttatatttaaaatatgactgttgaataaaatatcagttctatccaaagccatacatctgcttttaaatacggggcagtttagcagattgcatactaagtcctatggcacaacctttcaatcgcgactgctgtctttcttctttaaaatggaacactctatggtgaacatattgttaagttacgactgtttccatgcagcctgaacttgtttagcaatatttggatagtctaaaacgaatcttatatgcagctcggttcctgtctttaaggccttatcatctactataaaagaagggttatgattcggtgcagcttggcttaagtcctgattttcaggtgttgctcctaagaaaacgaagaaagagggcattaatttcccataataggcaaaatcttcacttgcacttgcattatggtccaaaacatgaagattcgaatctccaacagttttggctaatgttggctggataagttgagtaagagctttattattcatggttactggagcataaggcgcaatttcaacttttgctgttacatcattggcttgagcgttattttccaccagagttggtaagctctttaggatattttctcggatctgttcgttattggatcgaatagtaccgatcatattgacctgttcaggaatcacatttccagctgtaccgccttgaatattgccaatactaataacgcccataccttgggttaggtcggttcttcggctaataagactttgtaaattattaatcatttgagctgatgcataaattggatctctgcctaaccaaggggtagagccatgaacctgtttgccgttaacttgaatacgtaagtgatcggcactgtttaaaatagcaccatctttataatatagatgtccgcttttcatgccggacatgacatgcatgccaaaaatagcttctggtttgtagtctttaaatgcaccatccgcaatcatttttcttgagccgatttgatcaccatgcgtgaagttatctatatctgctccaccttcttcagctggctgaaatacaaaaactacagtgcctgatattttatctttattggccgccaatatctttgctgcacctaataacattgcagtgtgcgcatcgtgtccacaagcatgcatcacataagtttctttaccttgataaattgccttttgtttactagcaaatggcacaccacttttttcttccataggtagcgcatccatatctgctctaagcgcaataatagggccggggttattcccttttaaaatgccgattacccctgtttttgcataacctgttttgacttgaatgccataagactttaattctttttgaaccaatgcagatgttttaaattccatattgcctagttcagggtactcatggatgtgttgtcttaattgaatgacctgattttcattttgttgtgtagcatcttttacccaatccgctaggctcaattgacttattagggcaagtggaaaaattaaagcggcttttttgtacatatccttatcctaaaaatattattgttcagaagatttaatatctagatttcttataattcagtttttaaaaatattaaaaaatcaataaggtataacgaaagacttaaaaggtatagagtggctaatttattgataagacaatttttatttgagttaaaaagaatagttaaataaaaaaaggaagagaaaattctcttcctttgattagtttttaggctcaggtggcgtcatgccaaactgcaaataagattggttggttgcaatgcgacctcgtgcagtacgcataacataaccttgctgaattaaataaggttcaataacatcttcaagtgttccgctatcttcagccatagcagctgcaagggcttcaacaccagcaggtccaccatcaaaacgttctaacaacatacttaaataacgtcggtctaaggtatctaaaccagctttatcgacattaagcatatcaagcgcacgttgtgccatttcatggttaacttcgcctgtaccttttacttgtgcatagtcacgtacacggcgtaataaacgattggcaatacgcggtgttccgcgtgaacggcgtgcaacttcttctgcaccctcaactgtaatgggtacatccatgaggtttgcagatcgtgacacgatgtgagttaagtcttctacagaatagaattcaagacgttgcacaataccgaaacggtcacgtagaggcgaggtgagtaagccggcacgtgtggtcgcagcaacaagtgtaaaagggggtaaatctagtttaattgaacgggcagcagggccttcaccaatcatgatatcgagttggtaatcttccattgctggatagaggatttcttcaatcactggtgaaagacgatgaatctcatcaataaataaaacatcgccttcttcaaggttagtcagcattgcagccaaatcacccgcacgctctaaaacaggccctgaagtggatttgagattgccacccatttcacgcgcaataatattggcaagcgtagtttttcctaagcccggtggaccgaaaatcagtgtgtgatcgagtgcctcaccacgaccacgagccgcaccgatgaaaatttccatttgctcgcgtacgactggttgcccgatataatcggcaagtgacgtcggtcgaatagcccgatcaaaatgatcttcaggtttttctgttccactgattagacggtcttgcataggtgtgtttacttcatcattgatttaagtgcagcacgaataatatcggctgattcagtgtaatcggctttaaccgccgcaacagctttttgtgcctcaagaggtttataacctagtgactgtaaggctgcttctgcttctgcaacaggtgagttcgaaacaaattgaatctgaggcagggccgcagcgctagaagttccttgtgccaaagttttaaaacggtcacgaagttcaatcattaaacgttcagctgtttttttgcctacacctggaactttaaccaaagtattcacatcgtcatgttcaattgtgtgtaccagcaattcaacatttaacgtagaaagaatacctagtgccattttcgggcccacaccatttacttttagtaaggtgcggaaaatagttttctcttgagcatcactaaaaccataaagctgctgagcatcttcacgaacgaccaaatgcgtccatagcgtaactttctggcctttttgtaattggcaaaatgttgaaagcggtgtatcaatttcatagcccacaccatttacattcagtaagacagttggggcttctagggcaaacacttcgccaattaaacatccgatcatagcgtaatttcacttattcataactgtaaatctggtcgttttaaatgtattaaaacgacactagctgtatttctttctatattaaggcagcttaaaacaagccgattttattaccttgtagctcttgagccaagctataagcctgatgatctgaaaacttactgataatatcgagtacctgcatgatattgctgtagtggttattactaaagcgagcaccgtacaaattaagaatagacatcaagcgctgttctttaaagcttaaagatttatgcggcatcgttaaggggacaaatgcatcaagaatagtttgcaaactttggtgagcaataatttctaaaccagacttttgtgggtgttcgaagattttttcacgtgccagatttttggctgtttcaatacctgccgcgatatcaggcgaacagtactgtaaaagactacctttgagctgaccagtaataatttcataatgatgtttggcaaaagctgtagtgacttcatcaaccagacgcttcataacacggccacgcaatgccgaaattttttgttgccatgtgctacttgggagtgatagctcttcaggttgaccataatctgcaatcaagttgagaaaaattggttcaacctcttggtaattcagcatatttagaataatgccatcttctaaatcgatgagggcatagcaaatatcatcggcagcttctaacaaataggtaagtggatgacggcagtagtgatattcacctaattgaataagtccgagctgctcagcaatttgttttaaaatttctttttcagactgataacaaccaaatttcgctcgttggtgtgatggacgatcaccttgagaagctattgtttttgaaagccaaggatattttaaataagcgcctaaggttgcgtaagttaaacgcatgcctccatcatcaggatgatagtcaatacgggttaataggcgtaatccttgggcgttgccttcaaactgacggacatcggcttcttcttcgggagttaacttttttaaaaaatcattatgtgaggcatcgtcaaaccattcacgaattgcatattcacctgcatgaccgaagggtgggttaccaatgtcatgagcaaggcaggccgcttgaataattgcaccgacatcggcaggagaaatccagacaggcaattcatctttaattttttcggctgccagcatgcccatagaacggccaatacaggaaacttcaagcgagtgagttaaacgggtatgaatgccatcatgctgtgccaaagggtgaacttgagtcttgcggtttaactgacgaaaactttgtgaaaatataatacggtcataatctttatgaaatgggcttcgagccagctctgtactgctttttttactacctaaacgaactgcagatagcagttctaaccaacgcatttgttccatttatcattattcaaaactataaagtctgatcatgccaaaaaaatgctaaaagcactagcttggtgcgacatagtttgtcttagttcaggttttattatgttattgaataaacatgaaacaatttattttgagcgagaatgattaaaaaaatgattttgaacaaaaaacacatcacttcttgcagaattaggttacagaatactgattctacatctagctgattttagcaagacacagtagaatatgcgctctctctaaagtcacattgcggtaaggttcacaagacctgcccgtggagccaaaatcaacatgtttatcgtggccggtgcagcagcacattcttcttttaagaaagctcaactattaacacgtttatcgtcaattagttctgttcaatcttttgacagccaatgggtctatttgtttgatcaagcgctcaacgagcagcaacatcaatctgctttgcaattattaaatgacggtgagtcttttgaacttcgtcaacctgcaagtgatgagattcagattttagtaacaccacgcgtgggtacgatttcaccttggtcatctaaagcgactgacattttcaaaaactgtaatactccagttcaccgtttagaacgtggtcttttattcactttaaaaggtgtttctgaaatttctaatgaagtaaaacaagtacttcatgaccgtatgactgaaactgtttttgcacaaattgaagatgcaaaagcactattttcagaaacagcaccaaaacctttaaattcaattgatattttaggtcaaggtaaagaagcattagtaaaagccaacaacgaatttggttttgcgttatctgaacaagaaattgattatttaactgaagcatttactcgacttggtcgtaacccaaatgacatcgagttgatgatgtttgcacaagcaaactctgaacactgtcgtcataaaatcttcggttctgaatggacaattgatggtgaaaaacaaccattatcattgttccaaatgattaaaaacacttataaagaatctccaactgacgtgttatcggcatataaagataacgcatctgtaattgttggttatgacacgatgcgtttttatccgaaagcagatgaaaacggtcattttgtttacaaatataagagccaagctgctcacattttaatgaaggttgaaactcacaaccacccaacagcaatttctccatttgctggcgcagcaacaggttcaggcggtgaaatccgtgatgaaggtgcaactggtcgtggtggtaaaccgaaagcaggtttaacaggctttacagtttctaacttaaatattcctggttttgaacaaccttgggaagaaaactacggtaaaccttcacgtatggcatcgccattacaaattatgattgaaggtccattaggtggcgcggcatttaacaatgaattcggccgtcctgcattaaatggctatttccgtactttcgaacaaaacgtaaatggtgaagtgaagggcttccataagccaatcatgatcgcgggtggttacggtaacattcgtcctgaccatgtagaaaaagatgcgattcaaccgggtgacttgctcattgtattgggtggccctgcgatgttaatcggtcttggtggtggcgcagcctcttctgtagacagcggtacaatgggtgaaagccttgatttcgcatctgtacaacgtgaaaacccagaaatggaacgccgttgtcaggaagtgattgatacttgctggcgtttagaagactttaacccaatcgtgtctattcatgacgtaggtgctggtggtttatcaaatgcaatgcctgagcttgtaaacgatcatgagttaggtgcagttcttaaccttcgtaagattccttcattagagccgggcatgagcccaatggaaatctggtcaaatgaagcacaagagcgttatgttcttgcaattcgtccagagtctttagaacagttcgaatcaatctgtgctcgtgaacgttgtccatttgccgtgttaggtgaagcaactgaagctcgtcacttaactgttgaagatccattgttccaaaacaacgcagttgatatcccaatgcaagtgatgcttggtggtacaccgcgtatgcaacgttcttatgaaacaattgaacgtaaaggcaacgaatttgacgcttcaaaagttgatttgaaagatgcgattttccgtgtattgaaaaatcctacagttgcgtctaaatcattcttgatcaccattggtgaccgttcaattacaggtatggttgcacgtgaccaaatggttggtcgttggcagattcctgttgcagatgcagcagtaacgactaccagcctacaaggcttcactggtgaagcaatggcaatgggtgaacgtccaccagttgcattgttaaatccagcagcgtctgctcgcttggcagttgctgaagcaattaccaatattgcatgtgcaaacattgaacaaattagcgatatcaaactttctgcaaactggatggctgctgctggtcaaaaaggtgaagaccaagcattgtttgaaggtgtaaaagcaattggtatggaaatgtgtcctgctttaggaattgcgattcctgtaggtaaagactcactttcaatgcgtaccacttggaacgataacggtgaagataaagctgtaacatctccaatgactggtgtaattactgcatttgctccagtagctgatgttcgtaagactttaacacctgaacttaagaatttagaagactcagtacttgtccgtattgatttatctaaaggacaattccgtttaggtggttcgattcttgcgcaagtatataaagcaattggttcagtcactccagatgttgatagttttgatgatttcaaagcgttctttgctttaattcaagactggaataaccgtggcgtgattcaggcttaccatgacatcggtgatggtggtttactcgcaactgtagctgaaatgatgttcgcttcgcgtttaggtgtagcattagaagatcagactactgctggtttatttgcagaagaaattggtgcagtagttcaaatcaaagcagctgattgggaagctttacaagcagaagtagctgcttctagcttaaaagatgcaattgctgtagttggtcgcgtaaataatactgatcaattatctgtaaatggcttaactttagagcgtgctgagttacaacaggcttggtctgaagtatctcatcagatccaacgtttacgtgataacgttgaaactgctgaccaagaatttgctttaattactgataaatcacatcagggtttaattgcaaaacctacatttgatttaaatgaacctatcgaagcaccgtttattaatagccgtcgtccgaatatggcaatcttgcgtgagcagggtgtaaatggtcatattgaaatggctgcagctttcgataaagttggctttaacacaattgacgtacatatgagcgacttacttgctggtcgtgtgagcctaagtgatttcgaaggtttagtgacttgtggcggtttctcttacggtgacgtaatgggtgcaggcggtggctgggcaaaatcagttctgttcaatgcaaaactacgtgatcagtttgagcaattcttccaccgtgaaggtacatttagcttaggtatctgtaatggttgccaaatgttgtcacaattagcgccacttattccgggtgctgaacactggccacgtttccaccgcaatatgtcagaagtttttgaagcacgtagcgtaaacgttcgtgttgaaaaatcagtttctgtattacttgatggtatggaaggttcaattttaccgattgctgtagcacatggtgaaggccgtgcggttgctagcgaagctgatattgcaagcttaaatgcagcgaatcaggttgcattgcgttatgttgacagccatggtaacccgactcaacattatccattgaacccaaatggttcaccggaagcgattacgggcgtaacgtctaaagatggtcgtgcaacgattatgatgccgcaccctgagcgtactttccgtgctatccagcattcttggaaaccagaagagtggactgaagacggtgcttggttacgtatgttccgtaacgcacgtaagtttattggttaatataaaaattgaaataagccaccgtaaggtggcttatttgtatgtagtacaatgtgaatagaataaatagtagagaagaaaaatgaagtcaaaaatccatttccgtgagtttgcactgttgatggcattactcatgtctatcgtgtctttttcgatagatgcggtgttgcctgctttaggtgaggttggacgagtttttgaattaaagaataataatcagacccagtgggtcattattggtattttctccggcatgacaatagggcagttgattgcaggaccactttccgatgcgattggacgaaaacgtattttatttaccggtattatcatctactttttgggaagtttattgtgctttaccacacaaagttttgaatggtttttagtaggtcgctttattcagggtattggggtttcaggtccttatgtcgcctcaatttccattgtgcgagataaatacagcggtgctcaaatggcccgtattatgtccttaatcatgatggtatttatggtcgctccagcgattgcaccaagtctgggacaactcattattcacttctttggttggcgtgatatttttgttttatatatgatctatgccacagttgttggagcgtgggtcgctttacgattagaagagacgttacttcctgaaaatcgtttacctatgcgtttacaagcatttcaagatgggttcaaagaagttgtaagtaataaaaccaccatgagctatttattatgtgcaggcttttgctttggtggatttattggttacttaggtacttctcagcaaatttttatgcagcagtttggtaaaacagggcaagagtttagtgcttattttgctgtgcttgctggtgtaatgggcattgcttcatttaccaattctaaaattgtcatgaagtttggtatgcgtccaatctgtatttatggctttctcggtctgtgcttaatttcattaattttcttagggattcaacttataggtgtgactgtagcattttggatgtttatgctttatgcctgtattttatttttattatttggaactttatttggtaatttaaacgcgattgcaatggaacctatgggacatgtagctggtatggcatcagctattattggtgcagcttcgtccgtattgtcgcttattcttgcctctattattgggcaattatataacggcacactaattccaatgacttgcggttttgtcattttatgtggtttagcatttatgatgacagtatatgagaacagatatttaaagaaatcgaatgtttaaaatgatccagaataatgatagctcactgaattagaaaaattttctttaaacttaaagtaacggtaagaaaatacgttttttaaggactttaagaaaatctataagagtatagacataagtgtatttaaccccttatgcttggattgctgttggttcaatttttgctttctctgtaacaacgataaaaatcggagatcaaaatgatgaaaaacaaaaatcacataagaacgatgtacacaagagataaaggctggcgtttatttggcttggcgcttgccatacaaatactttttattggagcaaattatttagcaatgatgagctgactttgattcggagtcttcttaaagggtatgatttaaagcaaatttactagttttgagtcattctattcatgttaaagctgatttattacgtaccagagtcacatcttgagtcgactaaacagtctatatttgcggccggagcaggtgggatagggaactatgaacaatgtgcttggcaagttaaaggaatagggcaattcaagccagttaaaggagctgacccttatattggagagctaggtgaacttgagcaagttgacgaatggcgtgttgaaacgattgtgcttgaagaaaaggcaagtgcagtggcaaaagcattaaaggcaagccatccttacgaagagcctgcctttgagtttattcaaatcatagaagttgatttttaattaaactgtgaaaagtccggtttacgtttttgcataaatgcctgcacagcttctagcatttctggtgattgaacgcgttgcataaagatttctgcttcatggtcaatacattcaataatctgatctaaatcatgtttcattaatgctttggtttgttttaatgaagcaagcggtaaagctgttaagtgttgggcagttgcctgagcagtggcataagcatcttcaacgatttcattaactaaaccagcttgtacagcagtttctgcattgaactttttggcagtaaacagtagttcagctgctttgtgataaccagcttgtttaaccaataattgacttgcaccaccttcaggagaaagcccaaggctaacaaaaggaatttgaaagagggccgtattgtcggcaaaaacgaggtctgcctgtaataaaatcgtaacaccaataccaattgccacgccttttactgcaataataagcggcttcgataatctggcagcagatttaaggagtacaaatggaggaacttgacctgctggaccagcattcggattttgtacaaaacccataaaatctttcatgtcattaccagcggtaaagtcatgttcggcaccacgtagaacgattactcgtacatctttattttggtcggcttcatcaagtgctttggcaatccataagtaaagttcgccatataatgcattttttgcttctgggcgatttatggctaaggtgagtacgccaccttctaaatttgcttgtaaatgttgatgaggttgttgaatacagctaagtgtcatcgtactatccttgctttaaaccacgttgttgatttttaggttctcattatggcgcatattttttgtaatgagcgtaactggtgagttcataaaaagtgaaaaactaattatgtatacatttgactatctcgtttttataggtcgttttcagccatttcatttggcacatatgcaaacgattgaaattgcactgcaacaaagtcgctatgtgattttggctttaggttctgcccaaatggaacgtaatataaaaaatccgtttcttgcaattgaacgagaacaaatgattttatctaatttttcattagatgagcaaaagcgcattcgttttgtacatgtggttgatgtttataatgatgagaagtgggtaaaacaggttaaatcattagtaaatggtgtaatagaaccgaactcaaaagttggtttgattggccacttcaaagatgagtcatcttattatttacgactatttcctgaatgggtgatggtcgaacttgatagcttgaaagattcgatttctgccactccaatgcgtgaagcctactatctgggcaaaattaaaacggatgcatttcccaaaggcaccattcaatttttggaagaattccaaaatacaccgttatatttacagctacagcaaaagtttttacaggcagaccattcaaatattgaggaaaccgtgtcgtctcataaagaatgattcgatctaactaaagaatctctggtttttaaaagtagattgaattttttgatgcttttttgagtctactttaaaaacctgcaaattgttgtgtccaatagcttctttgtttagcagactggtcagaagcacatgcaatggcatattcggtatatctagggttcatgatattactgcaatgcagaggactggcgatccatttagccatgacctcatttaaagttttttgtccactcgcgacattctcaccattggctttactcagcatatgatatttttttaatctcgctcttaaatctaaacctgttgagccaacatgcccgagaaagttgttatttgccatatctttagagtgagcatttgcaccttgatataaattattattccagcttaaaggtttagctgcagaaaaatactgctgaccacattgacgagaatcttgtcgaatttgattaattgcattaagcacagcttgtcggtaagcagaattttgtaaatcttggcagcttatttctatcgatgatttttgaacttgtggtgtagaagagctcagtgtaggaggagtacttgatgaattaacggagcaggcagcaataacaaggctacaaggcaataaagtacaaacttttagtagattcatagcaatgcctgagttcgggttattttaatatttttatcatacgccaaattaaaatggctgagcaatttatgtgcgtgtaaaaaagcgagtattcaactcgcttttttgttactcaagcttattaagctgtttgtaatgcttttaaatcttctaaaacctgttcagcatggccggctgctttcaccttacggtaacttttaactaaggttttattatggaaaataaaagtagagcgttcgatccccattacttttttcccatacatattcttttctttaatcacatcaaagtgtttgcaaagtacttcttctttgtcactaattaaatcgattgtcagtgcctgcttttctgtaaagttttggtgggcttttaccgagtcgcgtgatactccaaaaatacgagcacctaaaacatcaaattgatcttttaaacaagaaaagccgacagcttgtgttgtacagcctggcgttgagtctttagggtagaagtaaataatcagccattcattatcgacttcagccaaattaacttcgccgtgtgtggttgggaaaacctgatttggcagttgaatattctcagacatttcttatcctttaaaagttaaatttgatctaattcaagtggtaaaaaagcatattcttcatgataaacaatatcgagctttcttacaggaatagctttgttaaaaattggaccatcaatcacagtggtatgaaattcaccgccttctccacatggatcaattccacggttttcaagttcctgtatatattctaacgataacacttgacctaaatcttccaccttcatcccgagtttaaggtttacagtcacaactacactctgaaatccaagttgaataaattcttcaacaacttcacgatggggccttagccagagcggcattcctaatttaaggcccactgtttgagtaacacgatcatgccaacaaccatgttccggcatatctaaatcacctgtaaccagtacctcagcacctttttgtttggcttcatttaataagttgatgaatttattttcatagtcattccagctagaagatgccataaatacaggtaagccaattgcttgtgcttgcgcccgaataatatcaagtggcattgcatgtgaacgggagcgttgtccttgctcttccagcataacgattaaaccaattacgttaccggtttgcatggcatgataaagtgcaagagagctgtctttacctccactaaaggagacaattgactgtctgttatgtgcgttagttttccattggtcttgcatggcttatttcgaatggcgagatcggtgtcattttaacagagctataaaaaaagcctgcataaatgcaggcttaatttggagcaacaaaagcttattttttaggagcttgttgttgagctgctttcattgcttcttcagttaatttctcaagcttagttgttaactgaggaccgaaacatgctttaagatcacggttttgttgttgtacaaaagctaaagagcttgggcttttcttcgcattgattgcgctttgaatttcccatttttgtgcttcagtcactttaccttgcgcttcaacttggcagctacagaatttgcttacttcagctgaacttaatttaccgccttttgcagtttgatctttacaaacgttgattaatgcacctttaacgttagtgcttttatatgctgcttgaactgggttttcagctgcttgagctgaaccagccataagtgcagctgctgagaataaagatgaaagaataagatttgattttaacaacttcataaattttacctacttattgcggtatatagcgtgttggatcggtaacaccagcatcgataaagccttctttacgcaaacggcaactgtcacatttaccacacgcacgtccttgagcatctgcttggtagcaagataccgtttgactatagtctacgccatgttcaatccctaaacgtataatattcgctttggataaatgtaacaggggtgtttcaaatttaagaggttttccttctacgccagctttagttgctaaacgagccatattggcaaaagcatcaataaattctgggcgacagtcaggatatcctgaataatcaacagcattgatgccaataacaattgcttcagcattgaaaacttctgctgctgctaaggcataagagaggaaaattgtgttacgtgctggtacataagttacaggaataccttcttgtaattgttctggtacagcaatgttatgatctgtaagtgcagacccgcctaaattggctaaatcgatattaattacacgatgttcaacacctgcacgctgagctaatgcttttgcagcatcaagttcagtggttgagcgttgaccatacataaaactaatagcaatacattcatagcgcgcttgtgcccaagctaggcaagtggttgagtctaagccgcctgaaagtaaaacaatggcacgagggcgcatatttttctccatattcggaatgatttattttattgaacgattagcgacctgattcatcgttccagagcagtttatgtaactgaagctggaaacgtacaggcagtttgtcgtccagtatccactgtgccagatcacgtgctaaacgtggcaggccaacagcacctttttcaactgcaaaagcaggggagaaccagacagtactgactttggtttgcagttgatattgttcaacttgttgttttgaccattcatagtcttcacgattacaaatcacaaatttgatttggtcacgcggtgttaaatggtcaagattactgatgagattacggtgttcttcaccagaagttggggtctttaagtcgaggacttttgaaacacgcggatctactcttgatacatcaagagcgccactggtttctagggaaacgtcaaaaccggcgtcacacaaacgttgtaataaaattaagcaattgggttgtgcaagtggttcaccgcctgttacacaaatataaggcgtttgatatttttcagccgtttcaataatgtgctcaagtgataagcgttcgccaccttcaaaagaataggtggtgtcgcaataactacaacgtaaagggcaacctgttagacgaataaatacagtcggtaggccagaggcatttgcttcaccctgcaaggagtaaaaaatctcggtaatgcgtagaccggacgcagggtcagagacaggaattgcagaggaacgtaaggaagccattctagaaataccacactatataaaaaataaaatctctacgatcagtgttgatcgtagagatgtttgatcaaactgaaattagtcagcgcgtaacaaatcgttcaaacttgtttttgcacgtgtttgtgcatcaacttttttcacgataattgcagcgtataagctgtatttaccatcagctgacggtaagttacctggtacaacaactgagccagcaggaacacggccataatggatttcaccagtctcacgatcataaatacgtgtagattgaccgatataaacacccatagaaataacagagccttcttcgacaataacaccttcaacgatttcagaacgtgcgccgataaaacagttgtcttcaataatggttgggttagcttgtaatggttctaaaacaccaccgataccaacaccacctgataaatgaacgtttttaccgatttgagcacatgaacctacagttgcccatgtatcaaccattgtgccttcatctacgtaagcaccaatgttgacataagatggcattaacaccacatttttagcttggaaactaccacgacgagcaacagcaggaggaacaacacgaacgcctgcagctttaaattgctcttcagtccaaccagagaatttagtttcaactttgtcgtagaaacgaagatcacatgactcgattggtttattgtcattaagtttaaatgataataaaacagctttttttaaccattgatgaacaacccattcaccattgattttttctgcaactcgaagtgtaccgttatctaaaccagcaattgcttcttcaacagcttggcgaatttcgcttgggcaatctgctgcagtgaaatttgcgcggtcttcaaatgcttgctcaatgatcgtagaaagctgagacatgatcttccttccataaaaaattttaaagattttacactaatttgtgacaagaatctttgaaaaaacgtgttacgtttaattgaggtataaatgagttaaatcaaaataagcttattagataatcaagtgttttttacacaaaaatgatttgaaaataaaaatttaactcaatttgtatcaaaaaataacagaaatctagcagtttttgtataaaaaagaatctatgctcttgaatataatttttgtcacaagctgaataaattaaaaacagagccttttcttaaggagaaaacgatgaaagtattacgtgttttagtgacaactacagctttacttgctgctggtgctgcaatggcggatgaagctgttgttcatgacagctatgcattcgataaaaaccaattaattccagtaggcgctcgtgctgaagtaggtactacaggttacggtggtgctttgttatggcaagcaaacccatatgtaggtttagcattgggttataacggcggtgacatttcttggtctgatgatgtaaaagtcaatggatcaacttatgaccttgatatggataataacaacgtttatttaaatgctgagattcgtccatggggtgcaagcactaaccgttgggctcaaggcttatatgtagctgctggggcggcttaccttgataacgattatgatttaactcgtaacgttgatgcgactcgttcattccgtgtaaataaccaagactttattgcgggtgccgatggtgtcaaaattaacggtcaaatgtcatataaaaatgatattgctccatacttaggttttggttttgcacctaaaatcaataaaaactggggcgtattcggtgaagtaggcgcttactatactggtaacccaacagttaagcttgtttcgtcaggttctgcagttacaactggtgatcaatcacttgaagaggcagtaaatgcggaagctcgtaaaattgctaacgatgataaatacaaatggttgccagttggtaaagttggtgtgaacttcttctggtaataaagcgtaaaaacgagcttcggctcgtttttttatatctaaaaataaaagagctacttatgtagctcttttatttttcccttaaattttattcatctggataggcaatttttttcaatgctttaatgtcagcatcaggtgagcataaagaaataaactcataaccataaccacgtaataaatggcctttgcgaacagcaatccatgtggtgttgacaccaaagatatcagttttaatttgttttaaacgatagtcacgctctgcatcgtaagcgacatcattgacaattccgacgcccatgccgagttcaacgtaagtcttgataacatcggcatcaagcgcagacattacaatatcggcatcaatttgtgcatcttcaaatgctttatcaatctttgaacgacctgtaaaaccgccgtgataagtaatcagtgggtattcagataaagcatcaagatcaattttatcgagctgtgtaagtgggtgatcttgaggagtaataatgctgtgctgccattgataatatggaatgcttgctaaattttcttcagttgttaaagactctgtcgcgatgccaatatcagcttcaccttgtaaaagcatttctgcaatttcgacagggcttgcttgttgcaaaatcaaatgaacttttggaaatagtttcttaaattgattgacgattggtggtaatacataacgtgcttgagtatgtgttgttgcaatcgttaaagtaccttcgtccactttattaaagtcatcggcaagacgtttaatattttcagcatctacaagcatgcgttctacaatgctaaggagtgattgaccgggttcagttaaacccagcagacgtttacctttacggacgaaaagttgtacgcctaattcatcttctaaatctttaatatgtttacttacacctgattgagaggtgtataacgcggcagatgcttccgttaaattaaagttttggcgtactgtttctcggataattcttaattgttgaaagttcatttacacttttcctcaaaagaggtgaggaacggctttaaataccgcgagatggctcctcaccaaataattccttaagcaacttgatctgcaaataggtgaagttgagatgcacttacccaaacagtttgatttggtttaaatgcatgttgttttgcagcttcactgctcagagcaatctcaattaaacgtccattacgatcttgtaattccgccactacttttccagcaatccagacttcacgtacaaaagttgcttcaattgtatttgcctgtggttgcgcatgaatatgtaactcatccggacgggcaaaagcaattacttttccttgcggtgcctgaactgtggtcggtaattcgatacgatcattgccaatacggataataccgcttgcatgttcaccttcaaaacgatttgcttgacccaagaaatcaaatacaaatggcgttgcaggtttttcgtaaacttcacgcggagaaccaatttgttcgacgttacctttattcatcacaataatttggtcggctacttcaagtgcctcttcttggtcatgggttacgaaaattgaagtgatatgcagctcatcatgcaagttacgtaaccagcggcgtaattctttacgaaccttagcatctagtgcaccaaatggttcatcaagcaataacacacgaggttctacggcaagtgcacgagctaaggcaatacgttggcgttgaccaccagaaagctgggctgggtaacggtctgctaaaaagcccaattgaaccaaatcgagtagacgagtcacacgttttttaatttcggcttccgatgggcgtgtggcacgaggacggacacgtaaaccaaaggcaatattgtcaaatacggtcatgtgacggaataaagcatagtgctgaaaaacaaaaccgacctgacgctcacggacatgtacattggttgcatcttcgccttctagtaagacttgaccaccatctgctgactctaaacccgcaataatacgaagtagcgtcgttttaccgcagccagatgggccgagtaaggcaaccagttcaccctctgggaaatcgagtgaaatatttttaagcgcatggaatgcaccaaagtgtttttcaatatttttaacttgaatactcatgatttcattccttacgaatcagttgaatgcggttctggtttgtcttgatgtagttctaaccaggtttttaaaatcagtgttaatagtgccaagaaagcaagtagtgaggacaccgcaaaagctgcactaaaggtgtactcgttatataaaatttcgacatgaagaggtagggtattggtctcaccacggatgtggccggaaactactgatactgctccaaactcacccattgcacgggcattacacaaaatcacgccgtaaatcagaccccatttaatgttagggagtgtgactttccaaaaggtttgccaacctgatgcaccgagtacaatcgctgcttcctcttcttcagttccttgcgcttccataagtggaattaactcacgcgccacaaatggaactgtaataaagatggtcgctaaaacaatggcaggtacggcatatagaatcttgatgtcatgttccatgagccagccgcctaaccagccttgagcaccgaaaatcagtacaatcattaaacctgcaataacaggtgagaccgaaaaaggcatatcaataatggtggttaaaattgctttacctttaaactgaaatttggaaacagcccatgcagcggcaacaccaaatatcacattaatcggaacggcaattgctgcggtcaatagtgttaatttcactgctgataacgtatctggatcaattaaagcttgaacatagacttcaaggccttgtttaaatgcttcaacaaaaaccagaataagtggcaacatgaggcagctaaggaaaaaaatcagtgcaattgtaatgagcgtataacgtacccaagttggttcacgtgtcgcgtcacgagattgcaatttcaaggcaagtgcattgctgtcggtatgtaggttcatgtgacatttctccctgtacgacggtttgcccatgcttgaagtaagttaatgacaaataaaataatgaaagagagaaccaacatcactgctgcaatagtcgttgcacctgcatagtcatattcttcgaggcgagaaatgatcataagcggagcaatttcagttttaaacggctggttacctgcaatgaaaattacagaaccatattcacctacaccgcgagcaaacgctaaagcaaagcctgtaaatagggcagggagtaatattggtaaaataattttggtaatggtctgccaacgatttgcaccgagtgcggaagccgcctcttcaagttcagtttcaatatcgcttaatactggttgaacggttcgaacaataaaaggaatgccgataaacactaaagctagcgtaatcccgatgggggtatatgcaacctgaataccaaggggttctaaatattgaccgatccagcctgtaggggcatagagtgaggtcaacgcaatacctgcaactgctgttggaagtgcaaaaggtaagtccactaaggcatcaaccagacgctttccgggaaagttataacggacaaggcaccaagctaaaagtagtccgaaaacaacattaataaacgccgcaattaaggctgaactaaagctgagttgaagcgattttaaaatacgttcagaggttaaaatttcccatagtccgtcccatccgattccaaatgatttgataaagactgcggctaatggaataagcacaataaaagaaacgtaagcgagggtgaagcccaatgatagaccaaacccaggcagcactcgggatcgctgcgacatgatatttcctcaaagagaaaagcctgctgaaaccagtaagcgaataaataaagataaacggcgcggtataaagctgggtattaagcaaatttcaaagagaaatgtgtctttaccggatcaatagatgagtggctacacatcgagtcttcaggaagtagatgattcagtaagtcaggaaacggaccgaagcctgaagcaacattaatatgaccgacttgtccaaggttaatcggggttaattgccaagatttcgcaagctgtaaagcatcaaaaaagtctaaccatggatcattttcactaatgagtagcgttgcaggcacattaatttttagctgatgaaaataatctttgtagtcagtcaaactatggcgggcaaatccggcttcaccaaaacgtgccggatttgcaggagcaaccaaaatcagttttttaacttgaagttgtaactctggatgctctgctaaggcagcaacactagttaggcagccgaaactatgcgcaacaatttggactggtgtttgtactgcttgaactgtgttaacgaattgctcaatccattcgcttaatacgggtctatcccagtttttttgctcaacgcgagaactagacacgagttgacgctgcaaccaagattgccaatgttgatgttcacttccacctacacccggaacaattacagtgtgtgtcatgtctgttctccttatcgttagaacaaagaattacttctctgcactattgattttcacgatttgatcgaaaacaccaccattatcaaagtgttgtttttgtacttttgtccaaccgccaaattctttatcaatggtgacaagtttcaatggcttaaatacattgctgtattttttgagtacagctgcattacgaggacggtagaaattacgtgctgcaatttcttgaccagcaggtgagtacaaatagttgaggtaaccttttgcaatagttaagttgccttttttcgctgcatttttttcaacaattgcaactggcggctcagccaaaatagataaagatggcgtcacaatctcaaacttgcctggttgttcacggatagctaaatgtgcttcattttcccaagccagtaatacgtcaccaattccgcgttcagcaaatgtagtggttgcaccacgggcgcctgaatctaaaactttggtgtgtttataaatttggcgaacaaattcttgtgcttttgcatcgttaccacctgcttgatgttttgcccaagcccaagctgcaagatagttccaacgtgcaccaccagaagttttcgggtttggcgtaataatttccacgcctggcttgattaagtcaccccaatctttaatttgtttagggttacccttacgaactaaaaacacgatagttgatgtgtacggagtagagttttgcggtaactttttctgccagtctgttggaagcaattttgctttttcagcaatttcatcaatatcagcagcaagtgctaatgtcacaacatctgcatttaagccgtcgattacagcgcgggcctgtttaccagaaccaccgtgtgactgtttaaactcaatatcttgaccggtacgctgtttccagtaagtaccgaactgtttgttgaaatctgtatataactcgcgagttggatcgtaagaaacgtttaagaattcttgagctgcaaacgatgaaacagaaagtaatgcagcaataaccccgacttttaactgagaaaaacgcatgagataacccctcaaaaaatacgaaatgttcaaaacatgaacgcagaatagcgctagtctttattctaaaaaaataataaaaaacgaatttaatatgaaaaatatagaaataataaaaatggataagttattcttaaatcttgatatataacaagtttcaaaagtttctcttaaatcggtataattttttaaaatcagtcatttattaattaaatgaaaggtgttgtattgttgggtggttttaaataaaggacggattaagcatgtggtgttttaaaaatggacaacctgtagagaccattcctttattggaccgggcatttcattatggggatggctgctttaccacaattcgtgtttttcaaaataagattgagcttaaagcacggcactgggaacgtctaaaacttgcttgccaaaaattatctttggttgcagattttgagttaatcgaacaaagtttgcagcatctacaaaatcagaatctcgtgctcaacgggactttaaaaattgtgattagccgtggtgaaggtgatcgtggctatagtttgccaaagcatgcggcagatatttatatctggttttatccaaaagcattggagcagttccaaccagattttattgagtgtggagttttaaatcaggctttaggtttaaccatgccgagtttagttgggcttaaatccttaaaccgtcttgagcaggtattgctaaaaaaagaagcagatcaacaaggctgggttgaagctttagtaactgatgtacaaggttatattgttgaaggggtaagcagtaattgttttattcgtttaaatgatagatggattactccggaacttcgctataatggcgtccacggtgtgatgcgtgcagaaattttggcgcgtatgcagcactacggaattgcctgtgaagtcagaataattgagctagatgaagtaccacaaatacagagtctattcttttgtaatgctttacatccaatgcgagtagttactcaaatcagtgaacaaattctagagtcacaggcgtgcctaaatttatttcatactcttaacttgaatcagattcattaatatgccgaagccacctgtgaatgcgaaagcaaaaaatgctaaaaaaaagggcaagaaaacagcatctaattttccaaaaaagttagtgctgattggctgttttatcgttttaatttctatttttgctattttatggtcaagtttatttaaagcttatcctattgaagggaaaaagcagatgctatcgatcacatcaggtgagacctattctggttttattgatcgcttagccaaagaaaataaaatccatttcccaattgtacttaagctttatcaaaagtttatgattcatgacagtatgaaagctggtgtatatgagatagagcagggaatgagcgtaagacaagtattagagatgttatctgatgctgataatgcccagatgaaccgtgttctagtgattgaaggaacaacttttaagcagctgattacagcactaaaaaacgataaaaatgtaaaaaatacgatattggatttaccagatgaccagcttatgaaggctttaggtattccttatcatcatcctgaaggtctgtttgcacccaacacttatttctttgctaaaggtgagaccgataagaaaatcctgactgatttataccatcgtcaaatgaaagccttagatgcggcttgggcaaagcgggcaccgaatttaccttataaagataagtatgaagctttaatcatggcttctattgttgaaaaagaaacgagcctcgatagcgaacttacacaagtttcaggggttttcgtgcgccgtttaaaactcggtatgcgtttacagactgatccaaccgtaatttatggtatgggtgcaaactataagggtaatattacccgcgaagacttacgtacaccaacaccatataatacctatacaattaatgggttaccgccaactccaattgcgctgccaagccaaaaagccattgaggctgcgttacatccagatgattcaaataacatctattttgtagcgactggtaatggtggacataaatttacggcagacttgcaagcacataaccaagcagtgcaagagtatttatccgtgttgagatcgaagaaataaggaaaagagatgtttattagctttgaaggcacggaaggggtaggaaaaactacactcattcgaaaaattcatcagcattttgaagaacaaggtaaacaagttgttttaactcgagagccgggtggaacaccactcgcagaacaaatccgttcgatgcttttggcagtgaatcatgatgaaaatatgagtcatgatactgagttgctcttaatttatgcggcacgagctcaacacttacaacaagttattttgccagcattagagtctaataaaattgtattaagtgatcgttttaccgatgcgagttttgcttatcaatgttccggtcgtggtttaagccaagacaaattacagcttttaaaccagaacttcgtttcacgcatgccagaagtgactttctggttagatgcaccaattgaacttggtatgaaccgtgcacgtgaacgcggagctttagaccgttttgaacaggaaaagttaagcttctttactaaggttcgtgaaggatatgaaactttatggaaagctgagcctgagcgtattaaacgtttagatgctacacaaagccctgatcaggtgttcgagcaagctctacaatatttagcataagccatgggattacccactctcatatttttttgggagtggtgaaaaatgacaagaaatctggttttaaacgtcatagaaaatattgggcagtatcttatgctattttaattactgtttaaaattgaagaataacaaggatgaaaagctcaaaagaagaaattgtggcatttcttgaaaaggaattcccacaaagtttggaacattgcacgattgaatcagtcacttctaaagctgccgttgtttattatcatgttgaccaaagacatcaacgtccgggcggtactatatctggcccgactatgatgactttggcagactttgctttatatattgcaatactcggtgaaattggaattattggtttagctgtaaccaccaattttaatattaatttcctgagaaaacccgcaggtgatcaagacttacgcagtgaatgtaagctcatgaaagtaggaaagagcttagtcgtaggtgaggtctggatttattcagtagggcaagaggaacccgtggcacatgtgaccgcgacttactcaattcctcctagaccataaatcttaagtaataaaaaagcacggcatgaaccgtgcttttttataaaaaactatttatacactcgtattcaccaaaggttgctctactgcaaagtttggaggcgtcagaaccgttttacgaatctcactcgaagtttccggataatcaagtgtgtaatgtaagccacgtgattctttacggtgcatagcacaacgaacaatcatttcggaaacaagtacaagattacgcagttcaatcaggttcttgctgacacgataatcttgataatattcagtaatttcgcgctttagcatttcaatacggtgtaacgcacgttctaaacgttttgtggttcttacaataccaacgtagttccacatggtcgaacgtaactcatcccagttttgtaaaatcacgacatcttcatctggattggttacttgagaatcgtcccaagtgggtacttccggtaatttgaagtttatatcaaacttactttcgatatcttttgctgcactcatgccataaacgaagcattcaagtaatgagttgctcgccatacggtttgcaccatgcaaacccgtataagaggtttcaccaattgcatatagaccttcaatatcagtctggctatttgagtcaaccacaacaccaccacaagtatagtgtgcagctggcaccaccggaatcatgtctttagtgatgtcgatacctaactcaagcaatcgtgcataaagtgtagggaagtgctctttaataaactcaggtgatttgtgtgtaatgtctaaccacacatggcgaataccgagacgcttgatttcatggtcaatggtacgtgccacgatatcgcgaggagccaactctgcacgatcgtcaaaacgtagcataaaacgttcgccatctggtaaacgtaagtaagcaccttcaccacgcatggcttcagtaattaagaaagaacgtgcttgtgggtggtaaaggcaggttggatggaactggttaaattccatattggcaacacggcaacctgcacggtatgccatcgcaataccgtcaccagtagcaatatccggattagatgtataaaggtaagctttcattgcgccgccgcaagcaagtgcggtaaatggggcaaggaaggtatgaactttttcagtactttcatctagtgcatacaaaccaatagcacgatttgcctgctctgtatgacctaacttatgcgacgtgattaaatcaatcgcaatatagttttcaaaaatagtgatgtttttacgttctttggcgcgttcaaccaaagtggttgaaatagctttgccagttgcatcagcagaatgaataatacggcgctgcgaatggccaccttcacgagtcaaatgaagctgttcatcttcatctaaggtaaactgcacaccttgctttaaaaggaaatcaacagaaggacggccgccttctacagtatgctggactgcatccatttcacataaatgagcacctgcaatcatagtgtcattaatgtgttgttgaatagagtcagtttcatcaagtactgcagcaacaccaccttgtgcatagaaggtacttgcttcagttaaagcagctttagctaaaactgcaatattaaaatgacttggtaacgataaagccagacttaaaccagcaccgccactgcccacaataatcacatcaaagtggtgaattgtctgttgattaggcatgtccattcgcatcaatttaaaacgtccgctaatgacacccctttttacctaaaaaggcaagagcttaagcgctctaagtcacagaaaaattgcaattagctttaaaaattgcaatgtgtaaaataaacgtgatgaggatgccttacaaataaacatattgttacgcacaattccaaggcattgtgatacaaaagttttattcttattctcgtagaccaattgtgggtgagcaccgaatgaaatctcgctatttacaacaaggaatgtatgcagcggtatttacagttgctgctgttcaagcaaatgctgctgttgatttttcaaacctcgttgaacaagttagtccggctgtggtgagtgtaaacgttgtaaaaaaaatgactcaggatgaactgttacaacagcaagttcctgaaattttaaaacgtttctttggtaatcaggtcatcattccacagcaacaaggtcctcaagagaaaaccgcatatggtagtgcgttctttattagtaaagatggttatttacttacgaaccaccatgtaattgaaaatgcttcccgcatcagtattactttaaatgaccgtcgtgaaattgatgcaacggtggtcggtagtgatgagcggacagacgttgcattattaaaggtaaacggaactaactatcctgctttacgagtaggaaatgttgaccgtttacgtgtaggagagccggttttagcaattggttcaccatttggttttgattattcagcttcggcaggtattgttagcgctaaatcacgtaacatgagcggtgaaacctctgtaccatttattcaaaccgatgtggcgttgaaccctggtaactcaggcggtccattgtttaaccagaatggtgaagttgtcggggtgaactcacgtatctttagtggtacgggtggctatatgggcttatctttctctattccaattgatgttgcgatggatgtagctgaacagcttaaaacgaaagggaaagtgactcgttcatacttgggtgtcatgatgcaagatattgaccgtaaccttgcagatgcctataaattacctaaaccggaaggtgctctgattactcaggtttctccaaattcacctgctcaaaaagcagggcttagagctggcgatgttattctaaaattaaatggtgcttctgtactgcgtactagtgatttgctttatgcattaaataaagtacaaccaaaccaaactgttcagtttgaagttttacgtgatgataaaacccgaaatatctcggcaacactagcaactgcacctgatgaaacaccagctaccggtaatcaagcctctgcttctaaaggtccagtattgggaatgagtattcgtgatctcgctgtgccagagaaaaatgctttaggtataaaaggtggtatttatgtacaagatgtccgccgtggtggattagcatcattgtcaaatatcattcctggcgatgtgattattcaggttaataatactcagattttgaacagtcaggattttgcaaaagttgtttcgaatttgccgaaaaatacagttgcgcgagttgggattattcgtcaaggacaacgagcaatgcttggtttacgtattcagtaaaatattataaaaatgaaccaccctgaaaatgggtggttttttattatttgtattcggcataatgttcgatctagctaattaaattttagctttgaatttaatgattaaagtgggtgttttgtgagcagtattttcgatttacatattcaggttcagccacagcatattgatgctttagggcatgttaacaatgtaatgtatgtccagtggatgcaagacgtcgctgctgctcatgtggaaacattaggggtaggagtaaccaaatatctagagctaaaacatgcaatggttgcggttgaacaccatgtgcaataccgtaaagctgcgtttgaaggggaagaaattgtgctgcggacatggctagatgatattaatgctctatattcatttcgtcagtatgcttttttccgtccttctgatcaggcaattttgttcgttggaaataccaaatgggcatgtattgaaattgcttcaggtcgacctaaacgtatgtcgccgacttttacacaggcttataaacctcttgattcaagtataaatcctttagattttactgtttcatatgcccgataatcagaagcattacttgtactttgaattatcattttttaaaacataagtacaaagctcatgaattttggatactttaaaatatccatctgctataatctctcgcaatttgttaaaccgctttggctatgtattaaaacaagctacatagcactttatattttctcaaggtagcccatggcgcaagctaaaaaatccgttgatatcaaaaatatccgaaatttctcgattatcgctcatattgatcatggtaagtctactttggctgaccgttttattcagatgtgtggtggcctgcaagatcgtgagatgcaagctcaggtcttggactcaatggagctcgagcgtgaacgtgggattaccattaaagctgcttcggtgacgttgtactatactcatccaaacgggcaggaatatcagcttaactttattgatactccgggacacgttgatttctcttatgaagtatctcgttcattagctgcttgtgaaggtgcgttattggttgtggatgctgcacaaggggtagaagcacaatcagttgcaaactgttataccgctattgagcaaggtctcgaagttcttccaattttaaataaaattgatttgccgcaagcagagcctgagcgcgttattcatgaaattgaagaaattatcggtattgaagcaaccaatgcacctacatgttctgcaaaaacaggcttaggcgttgaaggtgttttagaaacattagttgatgttattcctgctccaacaggtgaccgtgaggctcctttacaagcattaatcattgactcatggtttgataactatttaggtgttgtctctttagttcgtattaaagatggtcgtatccgcaagggcgacaaaatgttggttaaatctaccggtcagactcatattgttacatcggtaggtgtattcaaccctaaacatactgaaactggcgtgcttgaagctggtgaagtaggctttgttatcgcgggtattaaagatatttttggtgcgccggtaggtgataccatcacgctttcaacaacccctgaagtagcttcacttcctggttttaaaaaggttaaacctcaggtttacgcaggccttttcccaattgatgcaagcgattttgaaccattccgcgaagccttacaaaaactacagatcaatgactcggctttattctttgaacctgaaagttcagatgcgcttggttttggtttccgttgtggtttcttgggcatgttgcacatggaaatcgtacaagagcgtttagagcgcgagtatgaccttgatttgatcagctcagcgccaacggtagtgtatgaagctgtcactaaaaaaggcgatacgatctatatcgatagtccatctaaaatgccggatggttctgttgttgaagatttgcgtgagccaattgcagagtgtcatattcttgtaccgcaagagtacttaggtaacgtcatgaccctatgtattgagcgccgtggtgtacaaaaagacatgaaattcttaggtaatcaagtttcaattacttttgaaattcctatggctgaagtggttatggacttctttgataagcttaaatcatgttcacgtggttttgcttcacttgactataactttattcgttttgagagttcatctttagttaaggttgacgtgttaattaatggtgagaaggtcgatgcgcttgcaatgatttgtcaccgtaatgatgctcgtcatcgtggtattgctttagttgagaaaatgaaagatttgattccacgtcaaatgttcgatgtcgcaattcaggctgctattggtgcacaaattattgctcgttcgaccgtgaaggcgatgcgtaaaaacgttttagcaaaatgttatggcggtgacgtgtctcgtaagaagaaactacttgcgaaacaaaaagaaggtaagaaacgtatgaaacaagtgggtagtgtagaaatcccacaagaagcgttcttagctgttttgaaagtagaaagataagagaaaaggctgggatgaacttatattctcccagccgcaaggcaagcagctaagctgcgagtgaggtcctgtggattttgattttaatttaattcttgttcctgttacgctgattttatttgcagtgtggttgctagataagcttgtttttaaacagcgtgcaaataaagggcgagagaacgaaaattttgttattacatgggcctatgacttttggccggttttagctgttgtgcttgtacttcgctcatttctttatgaaccatttaatattccatcagactctatggttccgaccttagagactggcgattttattttagttaataaatttgactatggtgtccgtttacctatcgtcaataaaaaagtgattgatatcggtgaaccgaaacgtggtgacgtcattgtattccgttatccgccacaacctactattagttatattaaacgtgtaattggcttacctggtgaccatattgtttatgatcatggacaattgattattaatggtcaaaaaattcctaaagtaccaacacagtttagtcgcgaaaaagatgctttagatacaccaacttctatttatcataaagaaacaattggtgatcatacttttacgatgcgtgagcttgaaggcgtaaatgttgcgcgtcaggcaccatttatcaactatgttgataatggtaaatatgcaaaccaagacggtttatattgggaagtaacagttccgaaaggacattactttgcaatgggggataaccgtgatcaaagtgctgacagtcgtttctggggctttgtacctgaagaaaatttaacaggccgagctttctatgtctggatgcataaagaacctggtttccacctgccaagctttaaccgaaatgggaaaatagattaaaaacaaccattaggaaaacaaaaatgcgtaaggcacaacagggtacttcgtatttagcaattttatttggggtggtcatatttgcaattgcggtgaaagccgtacttgcagtttggccagcatattgggatgatcgtgtgattaataatcagattacagagcttatgcaacaaagctcggctgatatcacaccccaaaagtttatgacacagatggaccaacgactggaaatgaacaacattcgtgatctgcattttaaagagattgctgaagtgtttaaccagccaagtctaacagtcaaaaagaaatatgaggtaagaaagcctttcttactgaatattgatttagttttaacatttgagaagagttttgacaaaacatcagttcaagctaagtgatcctcgcttactcagtcgaatcggttatcaatttaagcagcctgaattgctacagttggctttgactcatcgttcggtgagtcataagtataactacgaacgtctggaatttttgggcgattcactgttggggatgattatcgccaattatttataccatgcgtaccctcatgaaaatgaggggcgactaacgcgtatgcgcgcgactttagtacgtcaggaagcattaggtaaaattgcaaccgatttgcaacttagtcggtgtttaatattaagcacaggtgagttgaaatctggtggtcatcatcgtgagtcaatattggctgacacagtggaagccattattggtgcaatttatcttgatagtagtgatctgaacctactcaaagatattgtgttaaaatggtatacgccttatttagatcatattgagccaacagatcaactcaaggatccaaaatcacgtttacaagagtatctacaagcacgtaaaaaacctctccctgtttacgaggttgtagatattcagggtgatgcgcctcatcagcactttaaagtcgaatgtttggtagatggtttatcaaaaattcatggtgaggggtcaagtcgtcgttttgccgagcaggcagcagcggcggaaattttaaagttattggagcaataacctgcatgtcgatgcattctgatcaaatcaatccagattcaaacgaaaaccaagatccaaacaatctgattgatcaattttttagttccaaaggcgttacaattccttcggattttaagagcggatttgtggcgattgtaggacgtccaaatgtgggtaaatctaccctcatgaaccatttattgggccaaaaactctctattacttcacgtaaacctcaaacaacacgccataaaattatcggtattgattcgcgtgaaaaaatgcaagcggtttatgtcgataccccaggtatgcataagaaagaagtacgtgcaatcaataaaatgatgaaccgtgctgcgcattctgcgttacgtgacgtgaatttagtcttatttgttattgatgcccagaagtggactcaaaatgacgatttagttcttgagaaactcaagaatgctgatatgccagttattttggtgattaataaagctgatacttttggagataagagagagattctccctttaattcaagaacgtgccaaacttatgaattttgcggagattgttcctgtttctgcactccgtggagcaaacttagagcacttaagtgaaacgattgaaaaatatcttccttatcagccacctttatattcaatcgatcaaattacggaccgttcagagcgcttcttggcaagtgaaatcatccgtgaaaaaatcatgcgtcagttgggtgaagagctaccttatgatttaacagtacaaattgaatctttcaaaacggaagaggcaactgttaatgaaaaaactggtcgtttaaaaccagcatgtacctatattgatgcaactatttttgtggatcgtcctggtcaaaaagcgattgtaattggtgaaaaaggtgccaagcttaaaacaattggcatggatgcacgtaaagacatggaaaaaatgttcgaacaaaagatcatgcttaccttatgggttaaggtcaaaggtggttggtctgatgatgaacgtgctttaaaaagtttaggatatagtgatatctaaaaagtagggaatactggtatgaaagcaattacatcaatattgattatcgttggatgtacattgatgttgcaaggttgtgtatataagcttgtaaccgtaccagtaggtattgcttataaaacgactaaaggtgtagtgaagggtacagctgctgttgtaggggctgtaattcctgatggtgatgacgacgataaaaaagaaaaagaatctgaggaatagtttctttttatgatgcgcaatgaagtcctacatggatatatgattcaccatcgtaaatatcgtgaaaaaagccatattgtgcatctcttcactcaagaatatgggcgggttgatggtattttaagacagactccgcctcctcaatatcagccaatccgtttgcaagccacaggcaaaagtgaactcaaaaattttacaaagctggaaatactaaatcagccggttttcttttttggcgatgctttttttgcagggttctatttaaacgaaattgttcttagactttgcccactagaagaggcaatgccacaaacttttgaacaataccagttaacgctgcttcaactccagcagctatcttctcatgaaaatccggatttatttcttagacagatcttgaggcaatttgagcatatcttgcttgcagagctaggctatgcgattgatttttcaattgatagctcacaaaaagaaattttgtctcaacagttttatcagtttcaagtgaatgaaggatttgcccccgttgttcaggcaagtcgctcatcgttgtcaggaaaagcaattttatccatgctgaattatgagcagggacaggatttttctcacgaacaattgcaattattaggtaaactataccgtcaaatgattacatcgcttttaggtgaccgtcccctaaaaagtcgacaattgtggattcaaaatactcaaactcaatcgtaattaggatttttttatggctgcattgcttggtgtaaacatagaccatgttgctactttaagacaggcgcgcggtactgcttacccagaccctgtagaagctgctcttatttgtgaacaagcgggtgcagaggggattactttgcatttgcgtgaagatcgcagacatattcaagatgatgacgtacgtcgtatgcgtccattattgaaaacacgtatgaatcttgaaatggccgtaactgatgaaatggttgagtttgcgaaagaaattcaaccgcaacatgtgtgttttgtaccagaacgacgccaagaagttacaacagaaggcggtttagatgtagtaggtaactttgaaaaagttaaagctgcaactcaagccttagctgccattggttgtgatgtttcactctttattgatgctgattttgctcaaattgatgcagcaattgcttgtggagcaccaactattgaattacataccggggcttatgcagatgccacaacagatcaagaacaacaagaagaacttgctcgcattgtcaaaggtgtggaatacgcagcttcaaaaggtttggttgtaaatgctggtcacggtttgaatctgaaaaatattgctccaattgcggcaattccacaaattcatgagttaaatattggtcactcaattattgcggaaagtgtttttgttggactagcacaggcggtgaaagacatgaaaacagcgattcaggcagcaggataagtagtaatgtcgagtatcaattacgatgaattaatgcagcctgtattagcatttttagggtgccaaaccccaaaagaatggttggatgaggccgttaataatttagacatcttgatgcaagatcatgctaactgtgagaaaaaggcagcgggtacggccatgaacttaatgttccgctatagttttttcacggacttacaagttaagcttgcccagcttgtacgtgaagaaatgcttcactatgaacaagttctagaatttatgacgaaacgtgggcaagagtggaaaggtttaagtgctggacgctatgcaggtggcttacgaaaagaaatccgcacatatgaaccagaagctctaattgatgtactcgtgattggggcttttgtagaagcacgttcatgtgaacgtttttatgcgcttgctccgcgtgttgatgatgagttaggacgttattaccgttacttgcttaagtcagaatctcgtcattttgaagactatttagcactagcgcttgacgtcgcaaaaactgccaaaatgaaagatcctgaagaagatattcaacagcgtattgaacatatccgtgaagttgaaaagaatctgattttgactccagatgatactttccgttttcatagtggtatccctgcataagcttggatacctcaagttaaaaagtttacctttcacggtaaacttttttattaagtagctctaacttctaaatagtttgagtcgatatttaaggttaagtaaggaccattttttagttttttaatgcatatcattatttaataaatatattttttacagatttaaatttctcttaaaatttttaaaaaaacttttatttttttaggctaataataaatattgtgtaaatataaaggctgatatgtttatcatgagttcaactgaagcagttgattatttctaaggatataagaatgttagcattagttacaggcgcatcagcaggttttggttatagtatttcaaagaaactgattgagtcaggctataaagttattggatgtggaagacgcgcagaaaaattagaagaactacaaaaacagcttggcgaaaatttctacccactcgtatttgatatgactgatacggcagaaaatataaataagttatttaaagaattaccaaatgaatttcaaatcgatcaaattgacttactagtgaataatgcaggcttggcattgggtctagagccagcagataaagcggatttagatgattggtacaccatgattgataccaatgttaaaggccttgttacggttacccgattaattttaccaagtatggtaaagaagaaatcaggcttaatcattaatatgggttcaattgcaggtacatacccatatccaggtggtaatgtgtatggggcaacaaaagcttttgtagagcagtttagtttaaatctacgtgcagatttggctggtactggcgtgcgagtaacgaatattgagccagggttgtgtggtggtaccgaattttctcttgtacgttttaagggggatcaggagaaagctaatagtctatacgataagaaaaatccaattttgccggaagatattgcaaatacagtagcatggatcgcatcacaaccaccgcatattaatattaaccgtatagaaatgatgccaacgactcagacttttaaccctttaaaagttgtagaagtggaataatgtaattttaaaaagatctaagcgtagaagatcacctaagtttagaactgatgattcgatctggtaaatattcgaattatgaaaagcaaatcctctacaggcagcaggggattttttttataggtatactgtaatagagagcaataaaaaagcccgctttaatgctgcgggctttttagtatttggctctcccacctgggctcgaaccagggacctgcggattaacagtccgtcgctctaccgactgagctatgggagaatctgcatgcgattataaggagattttgacaagggtcaagtaaaaatcgtcatgtttcattcatttttgtgttgtatgctttttatttgatcagttgaaaggtgagaccataaattacttgcactttgaaaattcaattgctagattcagaaaagaacaagcgtttggagtaatccaaacagtgtggatttaaaccaacttgccagcactaaaatggctaaatcggagataagtatgaaaacacttactgttgcttctattttttctaattttgatttttatcaacgcaattatctcaatattttaaatcaaccagaatcttattacacacctgtagaagatgcatggatcgatgcttttccatttaaaaaacaagatttgtacttaggtgacttactacaactctggtttagttcaaaatgggatgtgcatacttcgttgaaagttttaaagtgttccaaggtagtagatcaatctaaacctctctatattttccagctcgaaggagaattattcctaggtaaaaataaagttttagcctggtctactcagcatcataaagtgatagagcttcaacttaagaatatttgggcgccttatgtggttgcgaaaacttgtgaccgcccagatattccttacttaatgaaaaaggcagccgtttaaagctgccttggtttttatggtcgaataatcatgcaggttgctgttgcataagcataaagtttgccttcttcatcagtaatttttccttcggaaatacctaaatttttacttaaattgatcactttacctgtagcaattaaaacctgattttgtggaagaggacggcacattttcacattaagatctatggttccataacccacaccggcaggtagcattgtatgtacagcgcagccagtcactgaatctagaacagttgcagcaaaaccaccatgtacaccacctaaaggatttaggtgattatgatctgcttgtgctttgaaagttacagatccttctgaaatctcagtaggttgcatcggaatagttttgctaatactggcaggtggaatatgaccttcaatcatggcttgtaaaaattcgaggcctgtcatttccataggatttttcattttttgagtccttcagttattaaagttctaaaatggaacttgatgttaaattaggcgttaaattaactattgtcaagttggagtgaatagaaagataggtcacttatagtttataaacttgtaaaatttggttgagcagaatattttataactctaaaaatataaactttttgtggaaaataataatgaacggacagtgtttatgtggtgaaacagctttcgaagttgagttaaaaaatcatgatgtacatgtttgccattgctcgatgtgtcgtagacaaaccagtggtgtcattatgacagttgatgtagttaaaggtagtttaaagtttattcagcaaaagcatcttagtgtatttaactcttctgaatggggtgaaagaggcttttgtaacgcttgtggaacaataattttttggagaacaaaagatcaaagttactgcaatatcaatgtgttttctttaaatgaaccagtaaaagacttgaaattagatatggaaatttttattgattcaaaacctgatttttataattttcagaatgatacaaaaaaactgactgaggctgaggtggcagctttatttaatttagaataattttaattataaaaaaggcctcaattttgaggcctttttttatattttcaaattatttagcagctttttcagcttcgatagatgcaatcgcagcatcaacgccttcgattgattcagcagcttttttgatacgtgctaacgcatcaacaagtacttcgtcagctgttgcatatgaaatacgcatgaaaccacctaaaccaaatgcatcaccaggaacgaccgctacgccagtttcttcaagtaaccattcagagaattctgtgcaagattttaagccttttgcacgaataagagggcgaatgtttgcatacgcgtagaaagcgccatcagcaggtaagcaagagatccctttgatgtcgtttaagccattaaccactaagtcatgacgacgtttaaacgcttcaatcattggttttaaaacatcttgtggaccattcaacgcagcttcagcagcaacttgcgaaattgaagtcgggttagaagttgattgagactggatttttttcattgcaccaatgatttttgctgggccggctgcatagccaatacgccaacctgtcattgcatatgctttagaaacaccatttaaaacaatcgtgcggtcatataaatcaggtgcaacagttgcaatattgtagaactcatcttcccaacgaattggttcatacatgtcgtcagatgcaacaaatacttgtggatgacgacgtaaaacttcagctaaagcttctaattcagctttgctgtaaatcatacctgtcgggttagatgggctgtttaataccactaaacgagtgttaggagtaattgctgcttctaattgttcaggtgtaattttgaaacgttgctcttcgccacatttcacgataacaggcgtaccttcagcaataatgaccatatctggatagcttacccagaatggcgcagggatgatcacttcatcacccttgtttaataatgctagtgccaagttaaagaagctttgcttaccgccacaagaaaccaaaatctggttaggttggtaatcaagattattatcacgctttaatttagcaataattgctttttttaacccaggagtaccatctacagccgtatatttggtgaaaccattattaatcgcttcaattgcagcatctttgatgtgttgaggggtatcaaaatctggctcgccagcacccaaaccaatcacgttcttaccagcagctttaagctcagcagctttattagttacagcaagtgtaggggacggtttgatagcattgacacgatcagaaagacgtacgtccacggcaatattcctcttatgggattaaaaataaaaagcacactatcttatcgcaaaaattaagcaatttgcggatggggggatttttagatgtaaaaaagtttaatttaggaaagatcttgttgcggttttattcaattgaagcttttttcgaaagaaacaagaaaaatcctttataataagccgcaatcgaaatatcgagaatgaatcatgactgagcaacagccaaaacagaaaaaggctttggtgaaattgccatttccaatgccgaatgaaagtaaccaagcaggcgatgctgtacacaaccaagtacgtccgaaacctgaacaatatgcagatagaacttggatgccaccgcgtggtactcgtcgttctatgggtaagcgctaatttaaataaaaaaacaggcaatatgcctgtttttttatggtagaagaatttcttgataataactttttttcttttgatacatatgatgatctgcgcgttttagcatatcttcaacttgttcattttcttttgttgtggcgtgcccaattgcaatactaatagggtgacttgaataatattgattatctatattaaaaagctcctgaatggtttgcagcatcatcaaaacattcgcttcatctgcaccaggcattaaaatgacaaattcgtcgccaccgattcgagaagctgtataagcagtattcataattgcctgatttaaaatattacctactcgacgtaataaaccatcaccaatatcatggccaagttgatcattggtttcctttaagccgttcatgtctaaaaaaattgaagaaacagggcggataatactgcgatttaaacgattaagctcttctgtaaaaaaagctcggttataaagtttggtcagtacatcatgctggcctaaatattctagataattttcggctttctttcgtgcagtaatatctgtaagtgcaacctgtaccaatccccaagtctcttcataaccggggaatacggtaaattgcagtaagacatttctgatttgaccatctaacgcatagttaacggcttcacgcttgtggtgaatatttccttgccagagttcaatcagctgttctctaaaagtttccaccatctctttggcaaaaattttatgggtattttttaacagagtggttttatctggtgctttaaataaatcgagagtcgactgattgacgtctaaaattaaaatgtcttctatgcattggcgaacaaattcaggatgtacatctaaaaaagttctaaagtcttcaattcctaatagcctaagctgatcaattctatttttaatacggctaaaatcttcaacccaaagcgaagtcggggagtagataaacattgactctgctaggcgtcgatttttctcttcctgacgaagtgcattttgatacggagtaatgtcttcggtggtaattaaaatacggtcaaacgtagtttcagaacccggtaaaattgctccacgtagttgtacatcaatacgtttaccagagagcgtgtaatttatagtggtactcgagaaatgagttttgccattccataacgcttcgagttcatgaatatgagcttcaaacatttcttttttaaaaataagatttaagttggcacataactcttcttggttttttgcttcaaaaaggtctaatactttttggttgaccttaataattttaattttatgagcacattcaaccactagattttcattttgacttagaaattcatataagttttcaaccccttgatttctccataagtcaaataactgcttaacttcactaaagtcttcaatccacattggaattggggtgaggtcaaaaattgaagaatctaaagtttccatgcgtttcttttaagtattcagtttgtcttaaagtataatgagaaaaactaaggtttgggaaataatcgatttaaatctattagaataattaaaataaaaatattaaatataagtaaaataatgagaaagcagaatttatctgcttcactcataaaatatcaaagtaaattaacggttaatagggtggtcgatatttttctcaccgcgccataattttataaaatcttgctcatcaaaatcataaagttccataagcgcaacaattacacttacgaaaatcattgcaccttctgagttaccatgaatattaaaaatcttaccattgagtttacctaaaatatccctcaattcgtggtcacggcctctgccatagcggtcacgaggatacaattcctcattaagcacaataagcgctatcgctttttcagcacgtgataaatccgttttatctaaagcatcttcaaaagattcactggcgtgattaaagtaaaaaataacttcatcattaatgaaactttgaaccattttttgagtgagtgttgggaactgtgaaacagcatcttcttcaacatacggtttaaacgattcaggaaaaatcacattgtgatgtatgcctttaaaaagaggagcgatttcggaaaccttataacctgcgatcccacatcctaaagctgtcacaaagtatttcattttaggatgattttttgcataaactttaaagtcttcaacataatgctcgatttgggagagtggcatttgttggatatgttcatttaatgttggaattgcaaagctctgaccagcccagccacgtcctacaccctctacagccccaaaatgctgactggcaacacgtgcggctccactaccatgttgtccagccatattactaccgaagacaaacacggtatcttcagggagttcggttacaatactttcatcatgatattgataggtcatggttatgctttttatctaatggataagtccatgttgcaaccgtttacagcattggtcaagtatcaagatgcttaatattttcgatatagattaatctcactatagactttaaattagggaaaaaatccccattaatttgctagacgataaattcaaattttttataaagagagagaactgtgaacgaaaatcaacctttcgatttggtcactcattaccagccagcgggtgatcagccacaggcaattgaaaagctggtgaatggtatcgaaaagggttttcgtaatcagttactgctaggtgtgaccggttcaggtaagacctataccatggcaaatgtgattgcccaaactcagcgcccgacgattgtgatggcgcataataagaccttggcagcccagctctatggtgagttcaaagccttcttcccaaacaatgcagttgagtatttcgtaagttattacgactactatcaacccgaggcttatgttccgtcatcagatacatttattgaaaaagacgcagcaattaatgaccatattgaccagatgcgattatcggcaacgcgtgctttgttagaacgtcgtgatgcgattattgttgcttctgtttcggccatttatggtttgggtgacccaaatgcttatatgcaaatgttattgcatgtggtccaaggtgatcgagtaagtcgagacgaaattattcgccgtttggttgaaatgcaatatacccgtaatgagcttgaattcttacgtggtacgtatcgtatccgtggtgaaattattgatattttcccggcagaatccgaccaacatgcgattcgtattgaactctttgatgacgaagtagactcaattcgctggtttgatccgcttaccggtaaaatggtccgcaaagtaccacgtgtcacgatttacccgaaaagccattatgtgacgccaaaagacaacctaacacgtgctatcgataccattaaggatgaattgcaagaccagcttaagttcttccgtgaacatgataagttactcgaagcgcagcgtatcgagcaacgtactcgttatgatttggaaatgatgcagcagttagggtacaccaatggtatcgaaaactactcacgtcatttatcgggacgaccggcaggtgaagcaccaccgactttatttgactatgtaccagaagatgccttacttattattgatgagtcgcatgtaacggttcctcaaattggcgcaatgtataaaggtgaccgttcgcgtaaagaaaacttggtgaattacggtttccgtttaccaagtgcgcttgataaccgcccaatgaaatttgaagagtgggagcgtattgttccaacgactatttttgtgagtgccacaccagctagatatgaactggaaaaatcagaacaagtggttgagcaggttgttcgaccaacaggcttgattgatcctgaaattgaagttcgtccagtgcttacccaagtcgatgatgttttgtctgaaattaatattcgtaagaacttaaatgagcgtgtgttggtaacgactttaaccaagcgtatggcggaagatttaacttcttatttaaaagaatatggcgttaaggttgcttatctgcactcggatattgatacagttgaacgtgtcaaaattattcatgaattacgtacaggcgtatttgatgtactagtgggtattaacttgctgcgagaaggcttagatatgccggaagtttctttagttgctattttagatgcagataaagaaggtttcttacgttctgagcgttcgcttattcagacgattggtcgtgctgcgcgaaatgtgaaaggtaaagcaattttatatgctgatacaatcactgattctatgcgaaaggcaattgatgagacagagcgtcgacgtgcaaaacaaatcgagtttaatgagcagcatggtattacgccacgtagtgcagttcgtcaggctgtgaaagaaattgatacgggtgaagtactttctgatgatcagattgatgagaaagtactagagcaggcgcaagcacttagcgcagatgaacgacatattctttctgaccctaaattgtttagtaagcacattactaagctagagaaagaaatgttaaaggcgtcgaaggatttacaattcgagcaagcggcgcgtattcgtgatgaaattgttcgtttaaaagcgcaaatgttgcaataaatggatacataacactacatgatttgtttaaaaaacaagctactgtagatatttaagttattttgtattcacaacaaagagttgagggcaacaatggcatttcgaaataatgttccgcaagccagttggcgcttggcaaaaattgcattgggcggtattgttctgactggcttagctgtcggaacatatgcctatgcccagcagaagcctctacctaccgtcgataaggttgaattagaccgttatttaggtgtgtggtatgaagtcgcgcgtaaacctgcttttttccaaaaaaaatgtgcttacaatgtatctgcaacctataccttaaatgaaaatggaaacatagttgtagataaccgctgctacgataatcaaaagcaattacagcaatctatcggtgaggcttttgtagtcaatccgccgtataacacgaaattaaaggtaagctttttaccagaggctgtaagatggattccgataattcgtggagactactggattttaaagctcgatgaagattaccaaacagttttggtaggcgaaccttcccgaaaatatctttgggttttatctagaacgccacatccacacaaagaagtggttgatgaatatctaaattatgcaaaaacattaggatttgatattcgagatattattcataccgagcataaagaataaatatatactgcttaagaaaaaaccatgttttcgcatggttttttcttttttatagtggataaatcaagtattgtatcgctttatttttcttaaagtataaagaggttagtgatgttaaagggcgtgattttgtctgtcatggcatcattaacttttggtgttctttatttttatactcaattactcggccagcttgatagtgaacagactttcggatggcgtattattgcgactttgccatttttaactttatttatgtggtggagtggtgatttaagccatattaaaaatatatatcaacgtattttagcgaaaccttctttacttctattactcattacaacatccgttttgacttcggtgcagttatggctgtttttatgggggcctatgcatggacgtggtttgcaagtttctttgggatatttcctgttaccacttgttttggttttagcgggtagtgtcttatatggagagaaaatatcgaaatttcagtgggtcgctattgtccttgcaattattggcgtagggcatgagatttttcgactaggaagtattgcttgggaaactgctttagtggctataggttattccgcttatttcttgttacgtaagaaaattaaaacggataatttagggggcttttggtgggaccttctgattattatgccagttgcaatctatctgacacatacagggttattgccatatagtaagttcctcgatcagccgacactcgggttggttattgcgggtttaggtgtgcttagtgctataggcttgggatgttatatattggcaagccgttatttacctttggttgtgtttggtttgcttggatatcttgaaccggtgttacttgctttagcatctttagtgctgggggaaagcattggtaaagaagaatggtttacttatcttccaatttggtgtgccgttttcgtattggttttagaaggggcttttcatctttaccaacagcagcaaaaagccaaaaatttgcaattaaatatcgaaaaatatcaaaaaagattaaaaaatgatgctcacgattagagcatcaaaatctaaaaagtaagaaaaagcaaaaatttagcggctttaaacaataagataataaaaaataattataggtattttatgaatttatgatgaattttgggaaaatctagccactaacgtcagcttttgattcattcttgccaataattccattacaattacggggttttaaaaatcacgcctagatataattaattagaggacgtatctgtgagcaaagacactatcatcgccctgcacgctgaacaccaaggccgttggaaaaaccgtgaagaaatcgcggaacgtatgattgcattaatcggtcaattataccgtgaaaaaaatattgtcgtatctgtttacggtcgctctttaattaaccgttctgttatccaaattttgaaaactcaccgtcgtacacgtgttgtagatgttgagctttctgtagtaaatactttcccaattttagaagctttagcaaaagttgaaaatatcggttctgcagaagttgatatcggtaaacttgcagttgaatataaagaaaaaggcggtgatgttgacgcttttgttgctcaagctgttgagtcaattaaaggtagcgcaacttctgaacaacctaaagatgtagttctttacggttttggtcgtattggccgtatcttggctcgtttaatcattagccaatcaggtttaggtcgtggtttaagccttaaagcgattgttgttcgtaagtcttctgacggtgacttggctaaacgtgcttctttacttcgtcgtgattctattcacggtacttttgcaggtacaatttctgttgatgaagaaaacgaagcaattatcgctaacggtaacttcattaaagtgatctatgcgtctagcccaagcgaagtagactatactcaatacggtattgaaaacgcgcttttaatcgacaacactggtaaatggcgtgatgctgaaggcctaagccaacacttgaaatgcccaggtgttgcacgtgttgtattaactgcaccaagtaaaggcgaaatgaaaaacgttgtatttggtgtaaacaactctgacattttagatgaagacaaaatcatctctgctgcaagttgtacaacaaatgcgatcactccaattcttaaagtattggatgacaaatataaagttcttaatggtcacgttgagacagttcactcatttacaaatgaccagaacttgatcgataactaccataaagctgatcgccgtggtcgtgctgctacattgaacatggttattactgaaactggtgctgctaaagctgttgctaaagcattgcctgcattaaaaggtaagttaactggtaactctgtacgtgttccaacaccaaacgtatctcttgcgattttaaacttaacgctcgataaagaagttgatcgtgaagaagtgaacgaatacattcgtcaaatttcaatcaactctaaccttcaaggtcaaattggttataccaactctacagaagtggtatcaagcgactttatcggttctcgtactgctggtgtatatgatgctcaagcaacgattacttctggtaaccgcttaactgcatatgtttggtacgataacgaagtaggttatagctgccaagtattacgtattgctgagcaaatgtgtggcgtaagctataaaaaaatccctgcagaaactaacgcttaatctgctttaacgttagataaaagaatgtgacaaaaaaacccagtttagactgggtttttttacaaccgtacaaaatatatgctgattattttttagaaatcaatgagaatacggtttaaggaacaaaaagaaatagtaagggattggaattgcagcagtttaaaagattattgatcgtcttcttttttattatcatcgcgaatatatgtggtgtacttatcgccatttgggtgtttaaacattttaatatttatattcctttgaaaaaccaagcagtagcgatcgatttacaagaaccattacaggtacaagttaaagtaaaagatgctttaaatgtcgatgtaaaagggcgagtgaatgctaatattcctattaatgagaagttaaatattcctttgacgcagactttaacaccacgtgtctatttcgataatatggtgccgattagtacggttattccagttaaagaaactttaaaagttgaccaaagtttgccaattgacacgaaagttcaggtgagagtacttggtaaagatattactttgccattaaaaggtaatattcctttacagttggatgtacctattgatatacaagttccactcgatcaaaaagttcatttgaagtttgatgcgccagtaaaaacggtcttaaaagaaaatcttcatattccattaaatgctcaattaaaaacaaatattccaattcagggaagtttgaatgtccctgtgaaaacagctttaaatgcgtcggtagatgtaaaaaataccttgccagttaaaatcgagcatggtgagttaaaaataccactatcgagcatgagcctgaatcgcgttaaatctggcgaagatcactcttcacctgttcagaaccagacaaaataggtgaatggcttatgtttggctcattaaaaagtatattaatcagtttctttctgattatgatactcacggcaatcttattttggttctatttaaacatacaggcttcagttgtagtttcagcacatgagtcggatattcgtctaccagaatcattagaaactaaaatacatgttggtaataatttgcaggtccaatcgataggtaaattagacacatctattgatattgaccgtcagatttcagttccattaaaaggaagatacttggctgatttagagtttgaagtcgagactccaattacggtaagtgttgattatgcgacaacattaaaagtcgatcaggtgatgcctttagaaacaaccactgatttaatttacaaaaataagttattaccaaggtttccattaaaattaaatatcccgattaaacttgatattccatttcagttaaaacgtagttataccattccggttaaaattgcttttaatggtccggtttattttgagtttgacgaatctataaatttgccaattaaacatcagtttaatccaagtttgaacgttaacgatgcaatggaaatggggaatatttcaagctttaatgccattatgtataactctgttcagcacactaaagctaatttggacatgaagatggatttacctttacgtaatgtccatccttaggtaattaatcaataaaaatagatcatggcttgctgtaggtttatatcctgataaaaagaaataaaataagcagcaggaaagtagaattctctcgattttctattcgagaattttctgaaaatatggcagaataggcggttttagagtttttagaggattggcaaatgcgctttgttgatgaagcagtcattaccgtagaggctggcgacggtggcaatggcgtagccagttttcgccgtgaaaaatttgtaccatttggtggcccagatggtggtgatggcggacgtggtggaagtatctatattcaagcagatgatgatacaagtaccctagtcgattaccgttacacccgtaaattccgcgctgagcgtggtaaaaacggtgcaggtgctaactgtaccggacgtggtggtgaagatgtggttttaaaagtacccgttggtacaacaattgttgatacagattcaggcgatattattggcgatctggtagaagacggccaaagagtcatggttgcaagcggtggtgaaggtggtttaggaaatactcactttaaatcatcaaccaaccgtgctccacgtaaatgtacgacaggtacaaaaggtgagttccgtgaaattcgccttgagttgaaagtattagcagatgttggcttattaggtatgccaaatgctggtaaatcaacatttattcgtgcagtaagtgccgcgaaaccaaaagtagcagattatccatttaccactatggttcctaacctaggtgtagtagatgctgaccgtcaccgctcgtttgtgatggcagatattccgggacttattgagggtgcagcagaaggtgcaggtttaggtattcgtttccttaagcatttagcacgtacacgtattcttttgcacattattgatgtacaaccaattgatggttcagatccggcccataatgctaaagcaattatgaatgaacttgccaagttttctcctactttggcgaagttaccaattgtattagtacttaataaacttgatcagattgctgaagaaagccgtgaagaatggtgtcagcatattctagatgagttgcaatggacaggtcctgtctttaagacctcgggtttactcgaagaaggaaccaaagaagttgtttattacctcatggatcagattgaacaacaacgtgaacgtgaagttgaagatcctgagtacgcagcagaagtaagagcattccgtgaacagcttgaagctgaaacacgtgaacagaccattgcagcgaaggaagcatatcgtgctatgcgtaaggcacaacgccttgaaagcatgatggacgatgatgatgacttcgatgacgatgaagacgatggtgatgtagaaagcatctacgttcgtgactaaaaaaccgaggaaaacatgatagaagtggtcgatgggcaacgtaagctcagtgagtgtaaacgaatcgttgttaaaatcggatcatctttactcacggcaaatgggcagggtctagatctggacgctatttcgcattgggcgaaacagattgcagatttacacaatgctggacacgaaattattttagtgtcttcaggagctgtggcagaaggtatggttcgtatgaagcttgcgagtcgacccaccgatctacccagtcttcaagcatgcgccgcaattgggcagatgggcctaattcatacttggtctagtgtgcttgaaaatcatagtatccgaactgctcaggtgttgttaacacatgatgatttggcagaccgccgtcgttacttaaattcatgtgatgcattgcagaacttgattgattggcgtgttattccggtcattaatgaaaacgatactgtatctaccgatgagattcgttttggtgataacgatacactagcagctatggttgctggtcaagtacatgctgatttattaattattttaacagatcagcaaggtatgtttgattcagacccacgtcataatcctgatgcaaagttattatcaactgtgcgtgccatggatgatgttttatttgaaatggctggtggtggcggtgtgcttggacgaggtggcatggtcactaaagttcgtgctgcacgtttagctgccaagtcaggttgcccgacattgattgctagtggtgaaagcgacaatgtgttgtcacgagtgatggctggtgagatgctgggtacattgtttacgactgataaagaccgtatgacagcgcatcagcaatggcttgctgcacatttacaaacagcgggtcgtcttgtaattgatgatggcgcagttgaagcgattaaattgaaacatcgcagtttattgcctgttggggtaaaaactgttgaaggacattttgatcgtggtgatgtggttgaatgtgtcgataaacaaggtaaacgtgttgcggttgggcgagtgaattttagctctcgttctgctgaaattattaaaggtctttcttcagacaaagtttatcaagtacttggtgaagcccgttcattagaaatgattcatcgcgatcatatggcaatttactaagttgttctaaattaaaaaagctcgcatcatgcgagctttttttgtggggttaatgagggcaagattcgatcttcaccgaccataaaaggatgtgtagcaagactaagcatgtctaaatcttctgagctatttccatacgcatagattcgctgataatgttttagagaatattgctcatgtattcttaacttcttttgctcactactacaatccggagttgagtagtaacctgtcatcatgccatttttaatttgagtctctgtacaaattaattcgatatctagtaatttgcaaagtggagcaagatagatatcaatagaggcagaaactaataccacctgatcacctaatagctggtgttgctgtaattgtgcaaaaatttcaggtgaaagtgcagagacgagttcttgtgcgtattcttcacctagtctttgcaattcaattgcaggagtatctctgaacatgctacgaaatagcttggcacgcatagcatgggctggataaaagttaagataataggcttgaatccatggcaggattttcaagccttgcttcacaatatgacgtttagacaacgcataaaagataaaccctgtaaaactgtctttactgcacaaggttccatcaaaatcgaacagggcgagattttttatagtcttattcgtttcgctcgttgcatacatgtttcatatcgtccgtttacgcgggttgcataccagttagtattatagtcacgacttagtttaggcccagaaatcaccacttgcggcataattgcatagagcggctctttgccagtttttgatttataaagtttagtcagcgcaatataagtttgagtactctcaaactttttctctttttctaattttaaatcatcacgaatctgtcttggtgtaactaaaacattattactagcaaatacggtaattagttctttttctgactcgctttgagttgcgcgtggatcaccatcttttgtgtaaaggagtagatcgccatcaagacttatatccttgtcggtgagttcttttagcattttttgaaaagctgcattacgactagagtacataccagagttgtaatctgcaaaacgataaatggctttatcataatctgccggataaaccattaaacggtgaattccataataaaggccgccatactcggtatataagtcatcacgtagtgcagcagtattcatactcgagcgtttgtttgctttggcataattaatatgaacttgcattgaacccagtgtagtgatcggattcattttttcgccaatatcttgtccaactaatttagctgcgccagttaaagcactcacgtgatagtgtttggccataaaatcgaaaatttctcggtaaagtaaatcaaggtctttctcggttttaactttacgcatctgactcatatagttattgtcaggagagggttgggttcttagtacttcttcaaagtaacctgcaattgttccaccaatggttttgccaagcttatcttcaaatttttcatttaaacgtgtactgacttcctcaaccgctttttgtcctaatcctggcacttgaggattggcgacaaaattggattcctgatcaacgaccgccacaatactacagacattttgtttggttttaggaatgtctaagtctttcataatgtcatcaatatctttagcccatgactcacggtcatacacacgagatgggatgagacgtttgatttgctggctttctaattcaggctcatcattatttgaccaccaggctttatctccacaagcagctaaactcatgcatacggcaaccataccgaatgatttaaataaaaaacgggaagacaacggtttgttcatggagaggaggacacctgcataaaaagatgagctgatcaagcggatgaagtatactatgccgatcatcaattgtatgaatatatatgtatattggtccctatcaactgtcaaataatttaattgttgcccctatggccggtggggtagatattttattaagtatttttattattaataacttataaaactttgagtggtgcaaggtgcaaatacggtgcaaccactcacataattaatcaataacttagcgttttagctatgcattgcgcgccagtcggctctagcttcttcttgtttgctcttcagccataatgctacatcatttaaatgtgcacaccaaggtgaatatttaccatccggcttaaaaactggaaatggtaaatcacatttatttgcacgtttgtttgcctgtggcggcgaaagatgtggcaaataatccggcaatagttcttcaagtgttaccactggtttgcggtatttcatctgaagcaataaaagagtatcgaaagggtcatcaattttttgtgcagctgccatttaattcgcctccttctttctgcgggctaatactttattcatcgtgccccggttgagcttgagcattgcagcagctttatttttactaccgcgtgatttaatcaaagctttttcaataatgactaaaaatacatggtcaagaatttcacgataacttgtgccggtttccagcgctttgtccaattcttcttcagaaataattactcctttcaatttaaatcacctcagtagaacttaatcgaacgcccatcaggatacggccgcgcatatcccaagttatgttatttaatccaaatatctcttgtaacaagtcggctaactggtcactatccagaaataattccttctctataatttgtttctttttcaccaaactgcggaaagtatttataagttggggctttgggttcgcatcattgctagtcattgcaaaacattcatttttttgtggtaattcttcatttttgagtggcaaatcttcgatttttagcggtaaatcttcgatttttagcggtaaatcttcgtttgcaactggtaaagactcctcatctactttgtgagattcgtaaaaatcagcaccagcttttgcaacaaatttaaccattgctttcctggagagtgaaagtgcttccgctaatagttcttcctttgtagcaccagagatttccatcatttgtttaagacctaaacgttcatgatgaataattactgcagtaattcttcgtttaagacttattaaagatcggatctcttcgtcattcatttgactgtaatctttctcttgtaaagaaggttgtggactaactggagaaacttctactggattaaaactatttggcttagtattcacttttaatacttctattcgtggagttgtgttttgtaaagctgattgcataccgactaacgtgtatgtatcaccacatttttcaacttctaaattatctagcacttgcttcacagtttttgcactcaacttgcagatagtcattagctgagaaacagttaacccaaaagcatcattttttaatgcttgcgctaccttcgacttatattcttcgaaggtttttatttcagtaattcttttcatttccgctgcactattcatattctttcactccgaaaacacgagctcattgctaagacttcaagtgttcttcaaactctttaccaagagtctgagctaacgaattgccgactaactctctagtgaccattccatattgttttttgaacctaaaattaaagccgcggccatcttccatatctcgaacctggtagcccaaatgggctaaccagattttgaaggctaagaggtttttgcgtttcacgacctttcgcatcactttctccagctaccttctttcagcaaaacgttatagaggcactgatcaatttcagaagcatttacgttatcgaagtgatggttcatgaattcgccaataactattaatgttctagtcatcgatgagtatctaaatttcatggcagatcctcatcgatcaaatagatagaagagctagtattaggcttttcaagttcaagttttcgagctgttacggcttgcatcatcttcggttgagcaagcggatctaaactgtgaatatcaatttcatatgcatctaaagtagctaagtcaggggcattttggattttcacaagcaatgatggttcattagcttgcttctcttttttaagctcctcgaggcgtttatgcatatattgcaacaatggtgcgcgctgctcagctgaccatgaatttgtgtatttagttacagcattaacttctgttactgtctttgattcgtctacgcgcttttttaattcagcaagttttttctgatatttaccttcttcctcttcaatgtactttttgccattgttttgagaagcgtctggaacatttacatagacatcaactttttcaaatgatttagctttaatgtttaggcgtgtatttaattctgcattttcaacttctgttaaaacgccgttagaatttatacgagcacgaataaaatctaagtcttctttactcttagaattagaaatctcatcaataaaggcttcacataaaactgataattccggatcttgagttttcgcttcagctaaattaagtaagtcatgtttttcatcctcagccttagatttgatttcggctaattcagcaagcttcgtatttttagcatcttcaattgctttaagctggtcaggggtgaaagagtgtttttcaaggccaaagcaaagcgaatcaatttcacactctgttttgctggagctaataccgtcaagaataatgtccttttcggtttccaataattgtggatctgctgacacttcttttgttttctttttgccttttgattttaccgactttgtttctgtagaaagatcctcatcttcgtttgcatcattaaaaatcggatcgcaagtagtaagagtaatttcttgattgattccaacaaatgcttgaaagccttttaaaaacaactgggcattttcaaaatctctctgtactacaccattatttacaagagtaactaggtaagtattttttgaactgaaatcgccagcaatgattgttgatttagaaaaatcaacccaaaagactttttgctcatcaactaactcatctaaagtacaaggctttgtaaaggtgaaaccagcaagctcaattttttcaatatcgatgcagaactgatattcagggtttccaaacactgtcgcagggaactcatttagctctgcaaattcgccctcaatatggcgacaaagtaaatttttaccgctttgcaaagctgcaaaagcttcaacattatttaaaatattcatggttttatccttttattaatgccttacgtaggtatggatctaagtcatcttgctttaataaccaggtgacgtaatcagcaggtaagtctttaatgtccatacctttatgcttgccgaaagtaatttttttgggatgcgtgcttgctctgaaaacaagaacagcgattgcatatctttgatgcctaaagctttgcaaatttgcttgagcaatactgcagttaacaaaacatcctgcttcgcgttatgagcattacgaatagattctcgggcttttactgagccatttgacagcatgtaaatgagtgccgaaagattatgagctgcatctggccagacaaggcgagacaaggctaacgtgcaaattgattttgcatttacggacttgtcagcaagcttgatagctctcaggtcataatcaacattgtggccaatgatgtattgaacatccttaggcaagcggaatgtttcatagctaggcttgtctgctatatctgtttctagaatgtgatgtaccgccatggccccgaaactgatcggctcagggcatgagaagtactcatcaaaacaagcatctttatcaacaaacaattcaccgctatcaagaaagctaaccggtacatgagcgatctcaattggaaacttctcgaaatctgaggtttcagtatctaaaattaatgcgctcatgctttaatttcctgtttcgccagtttgtcaatttctgctttggccagttctattttttcagcttgaatatctgccaaggtgtcgatacctagaaattcacagacatacttaacgtctagaccgcgctcatcaataaacgcctgcagctggtcgcgttgcttatttgagatacaaccagttttaggtgcgtttggtggattttgggcttgggtggtgttgccacgttgttgttgagcctgctgtttttgttgctgagcagtaccattagattgaaccgcttcttgttgtttctgactcaaactttctaaatgctgttgaatcaccaaatacttttcattgcatgcagcaaaaagaatttcatcaaactcaggaagttgattgcgaataccatcaaagaaataagatgcctgagttaaaggcgtgtctaatggcaaatctttgatttgtttaagcgccttatcacagtcagcttttgtggccacataaccgttatttgattggttttggtatttctgagtattgtcgcgttgacgctcgtttttaatattgttattcgtgtgtgtatctaggtcattctgcgaatcatcaatcattaacaaattgccaagagcatatttttttgcatagctctgataagaagcatattgttgagttttagagacctttttattgctatttaggtcacgatcaaaatcatatttagcttcaccaggaacatcacaacgaatatatttctggtctttgaataccatgtatgcataaatttcaaaaccatcagcggtatcaaattttctagtaataacagtacatttgtacttcacaagaagtggctttaatgcttcttgaatatcctcagcagagcgatatttatagccaccaccaaattcatttgtatgagactttggagccttaagctcattaacaactttaataaaagttggatgatgaaaaacttgttcaagaccaggtaagtcaagaggatttacagttgtagcattacctaatacatcgggattaattgcagcattcattttgagtacctcagttatccgttataacgcgcatttttatatgcgattttttggtttgcgctgtatggcgtacgcttaaagcagtcctttgaaaaaattgcttcacgttcttttttgcgctgttctttaacttcctgttcaagattgcgaaggatccatggcctttgcttaagtaggccttcggttacaggtgtgctgccgttttcaccttcaatacgaatgtcatcaagttttaagttggtagagaaaacttgtggacctaaacgaacgtgataacgaccattgtcatcgcgagtaataaattcgcggaaaggggtggtatagcgttttttcatgattagccaccaaacatccaaactactaagtttgagataacgatccaaagcacgatcgaaagggcaataaacttaataaagtcaattgcattggctttaatggttgctaaacgagaagggcgctgttcttcagcggtagggtgctgaaataatcgggcagtcgtttgactctgaatagtgttttgtttcatacttgtctcgcattttgcaaagcacatcgagaggtagaaggttcggtgtgctttttattgtcttggtgaaatttagtttagtaaaaaactaaataggacgcaacaataaatttagtataaatctaaaaataatttattcttatactaaacgctgtttagtgcggacaaaataaaacccacaaaaagtgggttcataagttgatctttataagtttttttaaggcttaactagcgaaagttccaatctacctaaaaaaacgagttcatttaattgttctctggtgatgatttcatcgggatactttttcttatctggattgtcgctttgtaggcgtacagtcttctcgtcaccataactaataaacacacgtttcattcgcaataagctgttatgcataaaaacataaacatcaccgctaatcattgcagaagtatcaactggtgttgtatcaacaaataaaggactatcaggtactacagtaggccacatactgtattcagttgagtaaataatcctaagcctttcaggcttaatatttatacccattaatcttaagaaatttggatcaacttcaaggtaatcagttacgtcttctaggaaattagccacaccatccccacaggaagctctaacatttttatgcacaggaatcttaattgtatttttattttcaaatgatgatttaaattcgactggagatatacgcaagtcatctgactttgggtttacctgaggattaaaaggaacaatattattatgatcagttgagtggtcaacatccataaagccatgttcaagatttagcatcttttcaattcttctggcgacagtattccccagactaaccggtttgccatttttaccaagagtaccctgagtaatttgagtgatataggaggtcggtgtatccactaactccgcaaactctttttgagtactgtatttctcaagcaactttataaggttggctttgcgtattgctgaaatatccatagctgaattaaatagtaaaatactaaaaaaataaatgtgtaaaatactaaacgaagcttgcaataaacttagtaaaatactaaattataagaaggcaacttttaggacccgttttttatgacttctgttcaagaaacagcacgtatcaaaaatcaagtaagcagccttttggcatacatgaaaaaacttggctcagattctgaggttcaggcttttgcagaaaaatgtggaacaaccaaagggaacttattgcaaattgcgtacggcggaagcgtttcacccatcttgtcaaagaaaatctcaaaccaaagtggtggggaggttttactttccgatctaagaccagacattttttctgaaacataagatcaatacctatttttcgtttgaagttggtctagataaaaagtgaaaagccccattgcgaagaaatatgttcagcagatgttgattatctgcatcaacaaaaagcaaaggaaaacctatgcaaaactttaaaacgcattcaaaaccaagcaaaaaattacttgtaccaatgtcaacaagagtaccagttgaggtgcaagaacttgtagatgaattggtgggatcacatgagagagggagagctaaatggataagggaggccataaatttaaaacttgaagttgacttgggtcaatcatcaattgatgagctcaaaaaatcaaagaatacaatgaattcaagtgaatacctgagtgtattcaaaagtattttttctttattccatacaagcaaaaagcccgatgtgcgagatcgagctttaggtgttcattaaccaaggagattaaatcacatgtctactgtatcaaatcagatgaataaagacaaattgttagagttaaagcgccagcaaagttaccagtcctggcatgggccagctttaaaaacgcttgccgatttattgaaagaacgcaaagcgaacttaaagaaacgtaaccatgatgaaaaccaagcagcggtaacacgtgatgagtttatgcaaggcctagttaatgatcatggtgtacacggcataaatctttatcacgcgggtgtaattatctcgagtctgtatagggctaaaaaaattcgatatttgggtagcttcatccaaattattgaaggggatggtggcgcgtgatcccacaagaactaattaatgaaattaggcaaaatgccctttttgttataaatcatagcggtggaaaagatagccaagccatgatgataaaactacttgagtttgttcctaaggagcaaattcttgtagttcatgcaagtcttggttttatggaatggccaggagcattagagcttgcacagagtcaagctgctgcagctggcgttgattttattgtggccaaagcaagtaaaacatttcttgatatggttctgaaacgattttctgaacgccctgaggttccttcatttccttcacctaagtaccgccaatgcaccagtgacttaaaaagagatcctatcaagcgagaggtacgccgttacgcaaaggctaatgatttcaatcgaatagtaaattgtgttggtttgcgtgctgaggaatctagccatcgtgcaaagcaaatgatctttaaacctgcagctgagaatggtaaagcaggtcgcacctggcatgactatcttccgatacattctcttacaaccaatgaggtttttcagaccattaaaaatgctggtcaatcacctcattgggcgtaccaggataatgatcgtttaagttgtatcacttgcattatggcaagcgcgagagacttaattaatggtgcaacaaaaaatcctgaattctatgcattgatgtgtctggtagaacaaattactggatatgcaatgcacgctagtttgcggttccttcctgatctaaccggtatacatcctaattattcacttttaagcgaataccaagatctagtttcaaagttttcaaatacgcgctctaacagaaaacgtatacaaatgctggaggttgcagcatgagtaagtatgtccctaattcattccaagttgcgaacgcttttgtagatgaagcaatgagtaaaatctctgatgcttcagtaaaaatctatttgattattaaccgtaaaacacgtggctgggcaaaagaatgtgatgcgctttcacttacgcaactagaagaactgtcagggaaaagtcatccaacagtcgttagatgtacaaaagagcttgttaaagttggtttagtaagaaaacatgagcaatctgtatatgggaatgtttactcattaatagacaattattttgttggtgagcatgtaaacttcccaaacaagagttcagtacttgttcagtcttttagcttatttaatgggcagctagttaaaatttttaactaccaaaagcctgtgtctaaaaaatcagttaagagcaaaaagagtaaaaatctgtgtttaaattttccacaaaaatctcggttgctagttaaaaattttaactaccttgaaaatactagccagttaaattttttaactactgctagtaaaaattttttacccctactagttaaaatttttaacacacaaaacacactatcaaaaccaacttatcaaaataaaaaaatacatggtttgttttagaaaatttgaagtttgaaatttgttctatcaatccgtcaattgatacggatgagattttcaaggcctcttggtttgagagagagttaaaagcattcaaaggttttaacgaaggtcgcaatcactctgattacgatatggttcgattctttgctgagtggatgcttaaagcacgcgctaaatacgccaagatgaaaacaccggcacctcgccaaaacaattattcaaatggtcagtcagctaaaccagctaatcaaattcctgaagtaattactttcgcatctgaaaaacaactattcgcgttcgcacgccgtttagtaaaccatcctgatttcaaagatacattttgccataccggtgaatcatggatggatgctggaaagcgtatggctcaaaagttggtagatcctcaggaacaaaaaccatttattccgtatttgatcgagatgggttttaaaaactcatccaaggagacggctgcatgattactctaaataaaactaccggcattcaaaaattaaaagagattcttcaagaatttgattcttgtatgtacatcgaacgtgacaatttttttgacaagcattatgacctagttaaaagcgaaagtgatattgagcaaattcgtattgcagtcaaagcagctgaattaaagaggggtacacgtgtcaaagtaaatttcacacatgtaccagacaagggtcaaaacaaaattcattttgttggcaatggtactgtcgatctgtttgaagataaccgggtatttggtcgtttagatgatggccgacctttttgctgtttagtctcagatatagaaattttggtttcagaaaaattagaaaaggaagatggctacgaagaatctaaggcagtcaataaagtctatttttttctttgtttggtcttgggctgtgcagtagttaaggggtgtggcctatgaaaaaggttatcagttttagtggtggacgtacttcagggtatgcagtcaatctctttaaaaatgatcctgatgcttattttatttttatggatactggcgcagagcatccagctacttaccaatttattaaagatattgttaaacattggaaaataaatcttgtatgtcttcgtgtagtcgttaatccacaaatgaaaaagggtgtgggctacaaaattataccccttgatgagctcaaacaagacttggaaccttggagagatatgctcaaaaagtatggaagtccttattacgatatgccgttttgtacagctcgtatgaaaactgaaccttttgaaaaatattgcaatgatgtgtttgggaaaaacaactatgaacgatggattggtattagatctgatgagccaaaacggttgccaattgaggttttagaaaagcttggtttacctattcataaagacgcaaagaagcagaaagccgggtttagatatttagctgaaattagtgatttcactaaagaagatgttttggactggtgggaacaacaaccttttgatttagcaattacagaacatctaggtaattgtgttttttgtattaaaaaacacttaaacaaagttgcactagctgccaaagacgaacctgaacaagcagtgaaatggatagcggttactgaaggcgaaaacgtcagatctgaaggtagaaaatacaaccatcatcggatgtatcgaacgcggttacatttgagcgatgttatagaggctttcaaaaatcatgacagagatgagctttacaacgctcttagaagtagcaagcgctatgaaacaggctcttgtactgaatcatgcgaagccattatttgagggaatggtggatgaagttaactaaacaacaacgggcagagttaaaacaaaaatttggcggccattgtgcgtattgcggtgaaatgctcggtgataaatggcatgcggatcatatcgaagctgtgaaacgagatttaattcatgttggcggtggcaagttgattactggagaaatgactagaccgcaaaacgacactttggaaaacatgaatccagcgtgtgttccttgtaatacaaacaagtcgtctatgcccttggaagggtggcggaggatgctcacacattatcgtgatgttcagttgttacgagatagcacacatgctcgtcatttactacgttttgggctgattgaaatcaaatctgagcctgtgaagtttttctttgagagttataaagagggccagtcatgaataaaccattagaaacttttgatatagacgcagcaaaggctcgctacgaaaaattacgaggccgatataaccggagtgggctatctaatactgattacaacgagctacttcaattagaaaaggcaatcgagcaagcaaagaaagttaatgaaggagcgccgattgatgagcgaaaataagttatcaccaagacagttggtactcattcgacgggcagctgaagatgctatacatgcttgcaatagacattacggcccatttgttgactatgttgctcacccattaaatatcatttcattggttgatatggcgcaagaaagcctacaccagcaagagctaataaaacaaaaggatacagtaataaaatttgctaacagtatggcgaatttagatcaacagaagttcaaggaattacaagaacggataaatcttgccctgcaacaaatacaaggcaatttgcaatatgttgagcaggataagagagaaaactttgaatttctgcaaatggctatgattcgagcatttaaagaattagagaaagtgctcaatggtggtgagcctaaatgacatcgatgagtttagcggattatcactctaaatttccaaacggccataaagctaaaaagggccgtaataaatttaatgcttcaaaagtcacattagatgggatgactttcgacagcaaaaaagaactcaagcgatatatcgaacttaaagccatgcagcaacgcggtgaaatctttggattagagcaccatgcaaaatttgaattggctcctaaaactaagatagagggggaaaagagaacaaagccggcacttagatattttgctgattttacttactacctcatcaatggcgagtacatcgttgaggacgttaagtctattgctactaggaaattacctagttatcgcaataagaaacatttaatgaaaactgtacacggtattgatattagagaggtttgagaaaagtttatgagcgacattgaaacggtaggctggacggcagataagcggtttttcatattaaaaattaatatggaaacgagtttgactacagatgattgtgaggttttagcaggattgtttgttgaaaaatatagtctggaattttcaggctgccagtttcatggaaagctcgcagtgatatgtggagataaagtttacgtgaatccttgggcgcttgatcaagaagcaagtgtagatgaaccagttgaggaactgtcatttagtgagttccaaacgttattgaataattaaggtatagggggtgcttatcttatgactacagttgtaatggattggtcaagattttctatttttgaatggttcgtttgtggcttaaacccgaaatcaccttcatttggtgctgcgaacgttagatgtactgatgggaggtcaatagactttcatgacaaattaggggtggtagctgcaatgggtgatcaactaacaaaatcagttgcaatggtcattatgaccgaaggaaagtcccaacgggattatgaatatgttcgcaatcatttagctaaaataatgattgatggagcagagaaagataaaagaagagagcctaaggggatagctatttaccacttagcttggttaattgctcgtattgttattgattttgctttagatcccgaattagaaaacgcacataaggatcctggtcgacttgtttatgccggcattagaagtttccaaatggatccggaggtataccgcaaaacatggaaacgatacgaagatatgatgattgccgcgcttaatgaagaaattttaaaagctactgtaatcgctgaacgctataagaaagaaaccttaaatgaagcaagaaattagtttccacttttgtgctatttgaggtatagttttattaaattggtcgaagtataaattagaccaaattgcatttaaaagctcatctaaacaggtgggcttttttatggcctcattaaaagctcgggtccttaaggataccgagtttttttatttttagtcttaattctaggaataaacagcatgactatgacaaacgctgaattagagaatgaaatcaaagctctaaaaactcaaattacatctcttcaaggaactgttagcaataaagctgatgctacagcagtaagtgctttgaatgcccgagttactagtgtggaaggtgtaaatacaagccaaggtaattcaatcactactttgaataatggcttaaatgcagtttcgacacgtgttactgcattagaaaataaataaataaaaaactcggtcccaaatggagaccgagtttttttatatcgagtaaaactggggacgaagtactgcggtaacagcacttcgacctcctgacagatgtagcctgccaaaagccaagcccagctatcgtgcacacgatttgcgaaggctatcaaaaatataagcttttgcacaggaaaatttttatgaaatcaaaaccaataattccatggcaaggtggtaaaacccgtttggctaaggatttgttgtgtaagttcccagaacattcatgttatgtggaattattttgtggtggagcagcattattcttcttaagagaaggaccagcaagaactgaagtaataaatgatctgaatggcgagttggtaaatctgtaccgggtagtgcagaaccatttagaagaatttgtgcgtcaattcaaatggtgcatttcaagtcgccagatttttgaatgggaaaaactaaaagtaccagacacactaacggatattcagcgagctgcaagattttattaccttcagcaacatgcgtttggtggtaaggtttctgggcagacatttggatatgcaacaacaggccgctctttaaatctcttgcggatagaggaaagtttaagtgcagcacatttgcgtttgaatggagtctatattgaaaacctgtcctgggatatttgctttgataagtatgaccgggaacatacatttttttatgctgatccgccgtatctagatacagcaggttatggagtagattttccattagatcagtatgaacttctttctgaaaagatgaagacttgcaaagggaaggtaatgctatcaattaatgatcatgaaaagattcgtgaaatctttaaaggttttaattttgcatgtacttcaattaattattctgttggtcgtgatttggctgctaagagtaagaaaagtaatgaactgataattatgaattattgatctcataatttggtttaaaagtttgccgtaataattgcggcgcaaacggcccctctaaaaaatggttattggaggggctttttctttttggagaaataaaagtgcgtatgagccgattattactagccacaactgctggattaatggccttaaatacaaaactaagtgttttaagcgccttggttgcatcatgtggacacgcatcacctttgagctgtaaggcaaatacagtaaagagtaaacctaacaaactaagtcaaaagaaaaaacgccttattgctcgtcgtcttaataaacataagtgagctggataaatggacaaaaacgaagctaaaaaaaatctggataaatattcacaggaacttgagcgttatcaaaatctctccagatcgggtcttagccgtgatgaaatgttagttatcgatagaataattcttagattaaaaaagcaagttaataatttacggacggccttatatggacagtaacgattatttttggcttacaagaaaaaaagaaccaagaacaaaaccaaaaagccgcccattacccaaagcaactcaaaaatacctagaagctgaagaagaatttactcatgcattagatgtgcttgaaatcaaatatgaaaagaaatttaagtttaaatctacaaaacattggcgatttgattttcatttaattgaacatcgtattctggtcgaaattgcgggtggtccatggtcaggtggtcgaaaaggtaagctcaaagataaagcttggagtatggatcgatacgatgatgctgaagcaatgggatatacggttgttcggttagaggcagcaccaagttttaaaattaatgaatctggcccgttacagatacaagctcattttgctagtcagtggcttaaaaacttaaagaggcaaatatttaatggatcagatcagaccgtttccaccaactgattttattgatcaagctgaagaagaggaagcaattcgtttaataccggctccagacctaaaaaaatgggttgtggctaattacttaacgattggtgggcctctttataatccagatcatgatcatattgctgagttacttcatgataatgaagagttcttggcatttgcttgggcctcttctgcatataaaagcaagcaggcgatggtgctggggcagtgtgaaaaagtaatgtttaacgtcggtggctggcgtaaagctagacaagagcaacagatgcgtgactggttcggttttgtgccaacatacttaataactgtcgacgcttctttctgtgagcgtgcaaacgatacagagttctgttatttgcttgaacatgagctttaccacattggagtgatgagagacgaggacggagaaattgtttatagcgatagttctggtctgcctaagcactatcttgctggtcatgacgttgaagagtttattggcgtagttaaacggtggggaccaagtaagaatgttaagcgacttattgaggtcgcaaaaaatccgccgtttgtttctgatttagatattgcgagatgctgcgggaactgtgtaatcaattgagccttatggctcttttttttgtcctgtttgctgtacgtagctgtacgaaggggaatttatggcagcactaaaagagcctgtgaaaatatttattgttcaagctcttgcatgccgtgatacccctcaagaagtggttgaacaggtcaagcaagagtttggagttgatattagtcgtagccaatgcgaatgctatgacccaacaaaatattcgggcagaaacttaagcaagaagtttgttgagctttttgaattaaccagagagaagtttgataaaggcttaattgatattcctattgctaataagtactaccgactgaagcaataccaaagacagcttgagaagactagaaacgtcaaaacagccttaaaaattcttgagcaagccgctaaagacattggtggtcaatttactaatcgtcaagaaattacaggcaaagacggcggaccagttcaaacagttaattctgaaattccagttccaatggaagattacttaaaagcgcggagggaagtcttagatgagtactgatgcggctcgggataaagccatccagatcgaggcgcaagaagatttatatttctttacaaggtacatgtttaaggagcgccgaggctacaaatggatgcaaaattggcaccacttagaaatctgcgaagcattaatgaaagtttatcgcggtgagactaagcggttaattattaacgtaccacctcgatattcaaaaactgaaattgctgtaattaattttatggcttggtgttttggaaagaaacctgactgtgagtttattcatatcagttactcggcaatgcttgccgcaaataatgcatttcagactcgtaatatggttcaagaaaaggcttataaaaaggtctttcctgatcttaaattacgtgaggatagtaaagctaaggatttctggcgcacagatgcaggcggagtctgctatgcgactggtactggcggtaccattacaggttttggtgcaggcaaaatgcgtgaaggctttggtggttgcatcatcattgatgacccgcataaggccgatgaagccaaatcaaaaactatccgtgaaggtgtaattgactggttccaaaatactctcgagtctcgtactaactcaccagaaacgccaattattgtcattatgcagcgtcttcatgaagatgatttggctggatggctgctaggtgatagaaaagacggcgttcctgtagctggtggtaacggtgaagtgtgggagcatctatgtctttcggctattcaagaagacggatctgcattgtggccagcaaaacacaatattcaaaagttgaagcaaatggagcaagctgcgccgtatgtttttgccgggcaatatcgtcaaatgccatcaccgccagcaggtggtttttttaagcctgacaatattgaaattgtggatgctttacctgctgatgtagtgaagcaagtaagggcttgggactttggtgctactgagaatgaaggcgactttacagcaggtgttagagaagctcttggcgcagatggttttacttacattgtcgatgttacaagaggacagcttggtccagacaatgttaataagcgcttaaaacaagtcacagagttagatgggatgggcgtaacggtaaggattcctcaagatcctggtcaagctggtaaatcacaagctagtgcattcgtaaaacttcttgcaggatatgacgtcaaagccaaaccagtttcgggagacaaactcacacgtgcacaaccttttgcggcgcaagttaacgtgggtaacgtgagaatgcttagaggtgattggaataaagactttattgaagagcttcgcaattttccaaatggaacgcatgacgaccaagttgatgctggttcagatgcatttaatgaattgaatggaggttttgaggccttctttgctgatatgggatttgctcgatgagtgacgtaacttttaaacatcctgaatatgttaaaaacttgccatattggcagaagctagatgatgtgtgtgaaggcgaggatgctgtaaaggctaaaggagaaaagtatcttccgaaacccaatgctcatgatcaatcacctgcaaataaaagtgcttatgaggcttatcgtactcgggcagtcttttatgaagtaacggggactacatctaatagtttagttggtgcagcttttgcaaccgatccaagttttaaatttcctccagaactagctcacttagaacgcaatgctaacggcgcgggattaagtgcttatcaattggcacagaacgggatccgacatttattaaagcattatcgttgtgctttatatgttgactatcctgcagttacaccggctcgaaatcttgcggagtttaaacagcaaaaagcctacccgatgattcacttattgaatgccattgatgtgatcaattgggattcaatgatgattgataaccagaaaaagctttgcttggtggtcatccgtgaatttacttcagaacgaggcgctgatggctttagcaaatctgaggtagagcaatacagagtacttcgtttagagcctgataatgaaggaaacttcatctatacagttcaagtttacacaaaaggcgacaagggtacatggaagggcgaagataagaagtatcccactgataataacggggatttctggtcttatattccattcacttttgtgggggctattgataactctgaagagattaaaaagcctccattgctcccattggctaatcttaatttagctcattatagagatagtgcggactttcaagagtccgttttttatatgggccaaccacagttttatgctaagggagttaattgggcttggtatgacgaggctaaaaagcgtggcatttatatcggtgcgaaagttctattacctttacctgaaaacggtgatttggggattgtacaagcagatccaaacacattagcacgggaagctatgaaggataagtgggagcaaatgaaggagcttggtgctcgacttattgaaaaaggttccgcagctaaaaagactgctactgaatctaacagtgatgatgccgtgcagcattccgttctttcactttgtgttgtgaatatgaatgaagctttgtctatggctttacgttgggctgctaaatttgtagtacctaatgttgatgttctgactaaagatgaactgatgttcgaaattagtcaggaatttaacaagcaaggttatttagctgagttggctcgtcaattgtttgaagcagctttacaaggtagatcttcattcaaatcttggtgggaatacaaccaaacaggaatgtttcctaaacaaaaatatgaagaagaaatcctaaatgttgaagctgaacaggatgggactttgaatcaaggagtgaattgatatggcggcaactatcaaagaactcttagaggcactaactcaacaccaagcatatctttttcgcgcttcatcaaaaacagttaatgaattattaggtttatttaatgatgatacaaaagcaatgctttcaaagctgcgtgatctattagaggaacttaatgattcagagaaaattgctttagctggtgggaagtatacaacgtcaaacctcagagagattaaagatttgattgaccaatggtttgctagtgtaaatacaagcttacctgaagctttcaccgtctctgctaccgctttagcggtttatgaagctaattacatagccaagctatacggagcgaaaaataaaactcttagcggtgacaagttctattctgctgctaaaaaggtaccattggctggtggtgccctagttgatgatcttttatcaagaattactgaagctgcccgtcaaaaagttgaatatgcaatcagagatggtattaacactggcaaaactaatagtgagattattcagcgtatccgtggtaccaagaagctaaattatgaagacggattactcaacagcacaaaatcagacattgagcgcactgtaagaacggttcggagccatgtagctaaccaggcatatttaaaaagttttgatcaaattggcttcaaatatgtgcgatttgtgagtgttcttgatggaagaacttcaaaactttgtgcatcccttgatggaagcttttgggaaataaatgacccagcaaagcgcgttcctccattacatccaaattgtcgaagcattctggtaccagttgagaaagacggttctttagctggtcagcgtccttttgtgatggatgagagaagagtgaaagacatccccaaagaagagcgtgatcagttgattgggcaaatggatgcaaacataacatttaaagagttcttcaaaaagacagatgacttctttcaaaaagaatggttgggaccaaagcgttacaaactcttcaaagagggaaaatttgattttgaaaagttcttcgatccggatggacgtctttatacactcgaccaacttcgcatgttggacgaacaattgttcaagaggttgggaatatgaattttactttaagtggtgaggggaaaattcaactatctactcgagcaaaatacagattgcgtagatggcttagaaaacttgaaaagaggtcgaagttatgaagcaaataactatgactcaagcacaatacatcctaagtacaaatcttattgttgtgccttttgtaaggaagttgattccaagatatatggctattttaggatacaacttcaaacagcccacagcacagattccgcattaaacctaattcaaaccatagcaccttcgggtgctttttttatatgaggtcatcatgacaaagcaaccgcaaacacttcaagagctagttcaaaatgttgaatatttcaatgtggaccaagcatcaccagatgcactacctaaacgcattatatgcatcctaaaacttcactctggagtgcaagtaaacggcgagtatttgattcctgaaggttcacctgttggtgattacaatccgtttgcacttacatctgccattgaaaatttaaaaaagctcggatttgaaattattgaaccaccttctgaaccacaagtaatcgaaggtgaggcagttgaggttggccagaatttagatgacccatcacttaaagcggttgaagcaccaaaaattaaaagtctggaatcccatgtaactgttacgggcgcaggggttaatacttatgatgttcgtcatgcaaatctgcattcaattgaagcattgacctcacttttgaaggttacgaagttaaatactgatgtgtcgaatgctgcaaactctaagcttgttgaacttattaatggactctaagtttcaggcgtcttgagcatattttaattttaaccagcacactaaggtgctttttttgtgagaaagaaatgaccaaagaagtaacagagcaagagttagcggaaaagtctgtggcaccccgagtaactaaagcgcaaattgatgcgatgatggaccgcgttacatatacagtggagcagcgccctggaggtacaacatctacttttgtacatgcatttttagatggaaaattttttctagcaacgggttttagcgcatgtgtgaatgcagaaaactttgatgctgaaatgggtgagcgtatagctcgaagcaacgcagaaaagtcagccgaaaataaactttgggaactcgaaggctatcgtttatttgccacaaacttctaagtttttaatcgaaataaagcgtccttaggggcgcttttttaatgtctgccggaagcggatgcggacggtgaatccgggcggatgcccacttgtgtatataggttggatgaccaatgaaacttaaaacagtaacgatcgacggtaaagtttatgcggaagtagacggcgataagccgatctatattcatgatgacggcaaagaaatgccacatgatgcacctcattcggtagcaacaattgcacgcttaaacaatgaagttaaaacacatcgtgaagccaaagaagcagctgaaaaagcattaaaagcttttgaaggaatcgaagaccctgcggcagctaaaaaggccttacaaacaatccaaaatctcgatgataaaaagctggtggatgccggtgaagttgagaaagttaaagctgaagctatcaaagcagttgaagaaaaatatgccccgattgttgagcaacgtgatgctcttgaggcctcattgcataaagagctaatcggcggtggttttgctcgttctaagtacattcaagacaacattgcagtacctgtggatatggtgcaagcgacctttggtcatcacttcaaaatcgaagagggcaaggtggttgcatatgaccagaacggcgaaaagatttattcacgtgtacgcccaggtgaacttgcaaatgttgatgaagctttagagtcattggttggtggataccagcataaagacttaattcttaaaggtggtaaagggactggtggaggtttccaaagcgggggcaaaggtggagcacctactggaatgaaacgcagtgaaatgtctgtttctcagaaagcagattacatcaaagaacatggcaatgatgccttcctaaaactaccgaactaatcattaaatatttggagataagtagttatgactacaacagttaattcagacatgatcatctacaaccaattggctcaaactgcttatttagagcgtttgcaagacaatttgaacgtatttaaccaggcctctaatggtgcaattgtatatcgcaatgagattattgaaggtgatttcaataaagaggcattttacaaagtgggcggtagcatcaagcatcgtgatgtgaattcaaccgccaaagtagtgcctgagaagattgggtctggtgaatctgtaggcgtaaaagtcccatataaatatggtccttatgcttcaaccgaagaggcattcaaacgccgtgcacgcacacctgaagagtttgccatgattcttggttatgatttagcagatgcattagttgcaggacgtttacagtacagtttagcctccttaaaagcagctatttctagcaacccggatatggttgccaaaggcagtattgctgtagatgggcgtaaagcattaacacgtggtatgcgtaagtttggcgataagtttggacgtattagtttatgggtaatgaactcagatacttatttcgatattgtcgatgatgcaatcactaatcaaatttatggcgaatctgaaatcgttatctatggtggtttaccgggtaccttaggtaagccggtattggttacagatgccgtaggtgatgatgatgcatttggtttgcaaatgggtgcagttactgttacagaatcacaagtaccaggcttccgcgcgtatgacatcaatgatgaagaaaacttggcaatcggtatgcgtgctgagggtacatttaacctagatattcttggttatagctgggatacatcaaaaggtgaaaaccctgaccttactttacttggttcaagtgccaactggaaaaaacatgctactagcaacaaaatgacagcaggcacattgcttgatctatctggcacaacaacaactggttaactcataaacatctcactataagagggctattaagccctctttttacatttaagagaaatgcatcatgaagctaatttatacacgtattgctgctgcagctgcgttagaggttggaactattgccaatcctgattattacgaacatccgaatcgaagtgctgaagaagtaattatttacggtgattacccgaaaatccaaaatgattaccaagctctggatattcctgttgaagttcgcaaattggaagagcctgcaaaaacgacattggccactgtaaatgtagcggttggaattactccagagctgcaagaagttattgataaaactaaagctgagtgtgaaaaggttgttgaggaaaacgggcaacttaaacagaaaatcgaaatcttggaacaagctagtggtgatagttcggagttaatttctgaaaactcacgtttaaaagatgctgtactccaagctgacaatgctactaaagcggctgaagaaaaggtagtaagcattcaagcagagtttgatgcttttaaaaatgatgttgctgctatgcaagcgcgtattgctgaattggaagctggaaaagcggcagaaaattcagcaacagaaacggcagctaatgattttgaaaactggtcaaatgatcaattaaaagagtatttggctagtaaaaacattggttacaaaccgtctgcaacaaaagcagaactccttaaattaatcccgaaggaataatgcaatgagctttattactgtagatgacgcaaattcaattttgggcagcgattttgcaccagacagtgataaagctcgtctggtaaagctggctaatgtttggatgaaaaaacggattggttttgtaccagatcctattgatccacttcttaaagacgcggcttgtgaaattatcaaaggaattctggccaaagtaatttataacggcaaagaccagcagttgaaacgtaagaaagttaaagctgattctgttgagtcagaaaaagaatatcaggacggatctgaagcaatctctagctttgaacagatagcaattgattttattgattcacttgaattgaaagatccaaatgcaagttttaatggctttggcataccactttacagggcatgatatgggcttacgtgacgaaattcaggcagatattgctgaagcatttaatgaggatctggcggatgcggtccaaacatttacatgtgacagggttgttagtaccaactggaaccctaaaacaaacacctctgaaaatgtcattgagcattatgaggggcgtggcgttctgtttggctcatacaatcaatatgaaatacaaactctcggagtactggccacagataaaaaggcaactgtgctgcagaatgaagttaccaaagagccgatgattgatgacgaatggagtacggcgcaaggtacatatcgcatcatgcatatcaaacaagatccaatcagtgcaagctggaaatgtcagcttcgaaaagtgtaggggctaaaatggttaataccgaatatgttcaagagtggtacatcacaccttttcagcatgtgcaatacacgcttgctagaaatcagcttcacatggatttgttatttgaagatatggatgaagctgatcaatttttggatatgggagcggatgcacaggttagtactttttctgatggtgcatatgcaatcgtccaaattggtgatacggcggataaagacaaaattcaagtatatggattgcttttacatgaagcggttcacgtttggcaaatagtaaagaagcgaatgggtgaaagtgaaccaagtgttgagtttgaagcatattcaattcaagcgatcgctcaagacctatttgaaatgtacgaagcaagcgaggtgagcaatgggatggaaggggaaaaagccgactagctttagtgttgatgtggtgaaaaatgctgaagaacaagtaaagaaaatcacgatggataccgtgcaatcacttgtagtttcgagtccagttgatacaggtgcttacagagcttctcatatcgtatctattggaactgctgattatggtgttcgtgaaccatcaactaatccagttcaagatgcagcagttcaagcagtcaagtttaagcttggaaatctgatctttattcaaaacaacaaagcctatggtccgcgattagaaaacggttggtctgatcaagcacctcttggtatttacagcactactttcacttacattactcaaaaatatggtggctaagatgccaatgacattagagcaagctagacaagcaatagtcgaccgtatgatggcctttacaggaatttctcaagaaagaatccattatccaaatgcaccaggcttcttagcaccagcaaagggcttatggtgccgcttaaccattaaatggggtccaagtttcattgctgggttagccgatacaccctgtactcgacgtactgggaatatcttgattcaatgctttgcaagaccagacacgggagaccaggcaataaccattctaagtgttgcattactttcacattttgaatatttcaggattgggcatttagaatgctttcaaggtcaaacgatagatgcgggtaaagatgctgactttctgcagtacaatgtgacgattggatttacggtgaattgatatgtcttacatgctgacgctagaagaaattgaaattaaaaaacaagagcttgaacgacacttggcagatgtaatggctaaggagctaagtaaatggcagttgtctaataaattatgtatttctgatgtaaaaattcgcctcgctaatgttaatagcataaatggaccaaatttaaatattgttactggagtaagtgttgatttggatgattgatattaagttttaaagaagttaccgcctgagggcggtttttttacgtccctaattttatagccaccttcgggtggctttttttatgcctaacgtcggagtatatagatatgtcgagtggtgcacgtcagataacacaaatcgcgaaggaaaccactgttggtaccacaccttcacccttcgcacgtacgacctttgaatttactgaaaatggccttgatgcgacagtaacaaaggaagactctaactcaatcacaagtggccgtattgcacgttcatcaatgattaccggtgcagagtatgccggtgaattaaaatgtgaagcgaagtacagttcattagttcaagacttaatggctgcagctgcttttaataactggtcgtcaaatgtattaacttttggtggcacacttcgtcaaacattttctgttttacgtggctttgaagatgttaatgactaccatgttttccgtggatgtcatgtaaacacttttggaattgatattcctgaagctggcttaattacaatgactttcggccttatggctcttggtcgtacaaacttttcttcagcaccggctggaacaattacagcggcagataacaatcctaaaatgtcgaatgtctctgtaggtgacattttaattgacggcgtttctcaagctgggatttcatgcttgaccgcttttacatttaattgggataacactatgcagctacaacgctgtttaggtggtggtattgatgcacgtgcaatcctagaaatgcttgcaacaggtacaggttcatttaccgcagcttggtcacgcaatacatccgatatgtatgaaaagcaattcactaacaaaacgatttcattaaaagttccaatcactgatacagatgggaataaatatgaaatttttattcctaaagctgaaattactgccccattacctagtggtggtaattcagatcttttaaatgcttcattcgaatataaagtcgtagaagtagccccaaccatcactcgtacaccagcagcagttcctgcgtcttaatcaatctgatagcagccttagggctgctttttttggagtttaaaatggctttaaaagtaagcattcagactagtaaaacagttagtaaatggcgtaagtatattgatggtgaagggaatgtattagctgaatttaaagtacgtggtatctcatataaaccatatcaagtggcccttgagcgtgcaaataatcagattgcatcaaaaggttatgatgtaactaaagctagtaaagacgacaagctatatcatgaattgcttcttgaagctgcggcctgccatttaattgaggactggaaaggcgtagtttttgaagaagtaaccgaaaatcaagaactgattgtgtctgaaccagaatattcgcaggaaaatgcaattaagttgttgaatctaggcgatcttggtgtggcaatttggttgtttgtgagacaagaggcggaaaatatccaaaaagaagctgatgcatataaggatgaagtagtgggaaagtcattaacctctacaactggaccaagttcaactcagaagaagaagcgagcgactacaacaagaaacaaacagcaattgcaaaagccttaaatttaaaaatagctgaaaccatccaaaagcctgaatactcatttacagccaatgccattctttcagcatataacgtaatttcccgttcaaggcgttatgagcaaggcattcccttggctttggatattgcagctatatctgcctattgtgatcattatgagatcccagtcgaaagagatatttttaacgactgtatctttgcaatggataatatttttctggatgattctcacaaaaaaatgaagcgtccaacaaaaaaataaccctagaggtatttactaaaaacaactctagggttataattgactcatcaagttaacaaggggacggtgtgaaaagtctggatttaatcaaaatgattgaagcagacggttggtatgaggttagggtttcaggaagtcatcatcacttcaaacacccaaccaaaaagggattagtaacaatccctcatcctaaaaaggatttaccaaacggaactgttaaaagcattttgaagcaagcgggtctaaattgacccgcttcaatcagactcatatagtcctatttcacagtacgattttgtacatgaggtgagtgcaatgttatatccaattgctattgaaagaggtacagacaccgaagcctttggtgtctccgttccagatattccagggtgtttcagcgcaggcgatacattatatgaagctatcgagaatgttaaagaggctatttctggccacttggaaatcctagcagaagatggagaggagattcctttagcatctgatgtcagtaagtttattgaccaagaagattatagaggtatgatctgggcagttactgaagttgatgttagccgttacttaggtaaaccagaaaaaatcaatgttactttaccaagccgattaattcggaagattgatgataatgttggtaaagataaaagatttaaaactcgctctgcttttttggccgctggtgctgaaaagctactacatgcttaaaatagagaggccactcaatcgagtggcttttttatttcccacctgttaaattttacccattaataaagatgggtaatttcatgaaaaagattattttattgggtttagcttcaattcttggcggatgtgcagccacaacggatatgatgaacaatcagtatatgtctgttatacccactactaccgatctaagtggcttttggtctggcaataatggtccatatgcggtgacttactcattcaacaaagacggcactggcttaatgtgttctagttggaatggtaaagattctcttgaaaagttaaaaatacatggtgatgaaatcattttacaatcaggtttaaagcaaacaattaagtccaaaaccgaaaccaagttagaacttaatgttaaatattatggtggtggtagttatcaatacagcccagatcctaagctaatcaatgcctcaccatactgtgagaaagcactaagaaattagtccaaattaaacaaataacccgcgaaagcgggttttttattgcctggagaaaagttaaagatgactcaagaatcacgtctagtcattactattgattcgaaaaatgcggaacgaaacgcaagaaatctaggcaatgaactcgacagcatagaaaagaaaggggattttgcatcaaagtccatggatagtttatctgtagcaacaagagcacttgctggacacatggcaggtcttgttacggttggcgcggccatatccaaaatggatgagtatacaggcttacagaacagacttaagttagtaaccaagaatcaagttgagctaaataaagcaactgaagatacatttagaattgctcaaaaaacttatgcgacatggaattcggttttgcaggtctaccagcgttttagtgacaatgcgaaaacactaaacataaacatggacgaaacggcccgcttaactgaaacagtatcgaaagctgttgcaattagtggagcaagtgctcaagcagctgatgcagcactagttcaatttgggcaagcattggctagtggaacacttagaggtgaagagcttaactctgtgatggagcaaacccctgccttagcaaaagcgatcgcacaagggatgggtattactgtagggcaactacgttcagttgctgctgaagggaagattacatcaaaagaaattgttaaggcccttaaaaatgttcaagatgacgttgatgctctttttgcaaaaacagatatcactatcggtcaatcactcactcttttaaataacgagatcacaaaatttgtcggcgagtcaggaaagggaagcggtgcggctcatgtgcttgctgattcgattcagcttcttgcatcaaatttaaagttgatttctgatggagcactggtgttagggattggacttgtaactaaggcaatcgctactaaaaccgttgcggtatatgccgatgttgcagcaactgccgcaaatgtaaaagcaagcaaagaaaaggttattgcagatgcagctgaagcagccgctgctgtaaaaacagctcaggcgcaaatagcaaattcacaagcaacattgcaggttctagccgctgaaaaagcattagaagttgaaagactaaaagcccaaatgaatgcggtcggtcgcacacaatcaattacgcgtatggccgaattaaagaaaattgaggctcaggtaacgcgagaattagctgctgctgaaacagcattagcagctgcacaaactaaggccaatgccacaaaagtgacagccttaacaacattaggacgactcggaaaaggagctttaggacttgttggtggaccaattggtgcgctcgctttgggcgtttcagccttggccgcaacatacacttattttaaagacaaggcagaagaggcaaataagaagctcgaggagcaagctgcggtggctaatcgatcagccacggagttgaaaaatttgcaaggtcaagccaaaacagacgcaattaaagacttaacaaccgcattcaaggctcaaaatgatgagcttacaaagatggaatatcgggtaggttctgcgttaatcgacattcagaattatgcacaaggaaatgctgaagtagctcggatttcaaatgaagcgcgtttaggaaccattagttatcaagaagctttgcaacaactagcgaaagtgaaattaccacctagcttaagacaggcacttgaagaacaaattgaaaaatataaggatgcatacgataaagccgataagaccaaaacagcaattaaattgtttggtattgaagtaaccatatctggtaataaggctcagaatgcagctattgaacagcaaaaacatgctgatgcaattaaaaatacaaaacaagcagcagatgaggcgcaaaagtcactgaaagaaatgtatgatcaaaaaaacttagatactgattttttaacgatcaacattaaaagtcatggactggaaatgggtaaggcgttatcagatttttacgataacaacaaaatccctaaaactcgcagtttaactaaagatgaatgggcaatattccaaaaaaactttgataaggtgcaagagcttaaaaagcttgaggaggatattaccgcttctaagagacagcaaaccaaggaacttgagaaacagcaaaaagttttagctgttaactcccaagttaaatctaacgcctcaaagtataatttttccgatcttgaatctaaatatgacttattgcctggcctgctatcagcaatcaacatgcaagaaagcaggggtgatgcaaacgttattggtccgaatacaaaatacgggaaagccaaaggtgggttccagatgttggatggtaccgctaagcggtggggattagttggtaaagaagtttttgatactggcaaagctgcagaagcagctgcgaaatatcttaactttttatttaaaaagttcggcaattgggatcaagcaatttctgcctatcatgctggtgaaggtaacgtagaaaaaggtaccaatattggtcctgtaaatagacagtacgttaaaaacgttaaaggatatattgctggatcaaatggttttgatatgaaaggagtctctgaaaaagatttcgattcctaccttaatcaatttcttaaaacgcaagaggaaactgaaaagctacgtgatcagtatcgagataaagatacgcttgcagagaaagaatatttaaaaagaattggtgagttaaagttacattttaaagatgcagagttaaagcaactcacggataaagaaacagcacgttacaatgctcaaaaggagttaaacgctgaacaacttgaatttgaattaaatgagttccgtttaaatgaagttcaaaagctggaaaaacaaaagcagattaaattacttcaaatcaaagcatcaactgaatactctgaaactgaaaaagaaattcgaatcaaagctgttaatgcaatgtttgattatgaaatttctgagtacagaaaacttcaaaagcaaaaattggaggagtatcgaaaaacaatgtatgagcaagcctcaataccacaatcagatgttattaatttactagctaaaaagaacctaacttcttcgcaatatgattcatggaatctacagaatcaatatagtgatgaaatgcaaaatgctaatgatgcatattcgtcaaatgttaaagcgatctcagaagataaaacaatcgttgacgaagagaagcgcttccaggccttattagatgctgaagagctatttcgtcaacaaaagtatgccatcaatgaaaaatatacattgatggaacaagaactccagaaaaatgcccgtcaagctgaaatggaagtatatggccagttattgtctcaagcttctacggtttggggaaatatgactgcgatggtaaaagaatctgctggtgaacaaagttctgcttataaagctatgttttttgttcaacaaggtattgccattgctcaaggtattatcagtacagaattagcggctgcaaaagcattagagttggggccggtattaggtattcctgctgccgccgttgtacgcggtttagggtatgcctcagttggactaattgcagcccaaacaattgctggcttctctgatggcggttataccggtaatggtcttaaacacactcctgcagggattgtgcataaaggtgaggttgtttggtcgcaagaagatattaaacgctggggtggtgttagcgttgttgaaagtatgcgtcaaagcaatccaagtggttatgcgaacggaggttacgtttctaataatcagtctgatgctattgcaatacgtagagagtctagacagtttgaggcaatcaactctaatcaatctcaattgaatacgaacgaaaagccaataaatgtgtatgtcactgttaatgccgatggcacaagtaaaacagagacagaaaacgactcaaaacaattgggccaaatgattggtaatgcagtaagaactattattcgccaggaacaaagacaaggtggtttgttatctaagtaacgcctgaactgtttccacttttccgttaattggggtatagtttaattaatatggtcatactttagttatggtccttaaaagctcgcttattgcgggctttttttgtgagaaataatcatgagtgacttaaaatttacctttgagtgtgatcttgaaggtaataatcaaacccaacgttttaatacgttatcaacaaaatttggtgacggatatgaacaaaatacttcaattggtataaacaatcgatctggtgaatggacctatcagcgcacagctaagaaagctgaaattttggaaattaaagcattctttgataagcacaagggtgctaattcttttctatgggattcgccgttagatggtgaagtgcgcgttaaagcaggggattatcaacctgtttgcttgggtggagatacgtggcgcattacaaccacatttactcaagttttctatccataattttttctcaacggctccttaaggagcttttttattgcttattggagcagaaacatggctattaaaactttagatcttgctgaagcatatattgtcggtgaattacgcactcaattattagatgcacgtagtttcgggaataatttgcctgctggcagaattgaaactttagcgattaattatgatcgaccttctgattcagtgaatattgctgttacaccaggtggtggtttaaacggaagtatgactttacttgatgctgacatcacaaagtgggcaattcaaacgatcttaaacacagcttatctctatcaggtagatgtaaacactttaagccttaaatatgacttggctgctaaaaaaattactattgaatatactccagttgtttcaggtcaagcttaaggaggtctcatgactttacaaagtgacttccagaaacttgaaccaggtggattaattcacctgtatgaattagatgccagctcgtatggagttggcattcttcgatttcatggccatcagcaaatggaaagtattttttggcagggtcaggagtttgaagctattagtctggatgtctctggtttagaaatgagatcagatggtaaggcttcggctcccacattaacaatcgccaataacctgaacggaatacaaggtgcaatttcagcttactgtctccaatgtaaagatttcgttggagctaaactcaaagttataaccacactcaccaagtatcttgatgccaagaactttcctgaaggcaatccaacagcatcaaatgaatcaaaagagcagatttggtatatcgagcagaaaacatctgaaaatgctcaacaagtaacttttgagctttcaaacccgattgattttgaggggttgagaataccagttcgtcaaattacttcattgtgccattggtgcacgatggggaaatatcgtggtgaagaatgtggttataccggcgctgctatgtttacagaaaaggatgagccaactgataaccctgcattagatcgatgtggaggaaggttgcgctcttgccgattacgctttggagaaaacaagccccttccttttggaggattcccagcatcaagcttagtttgaggtcctatgaaactaacagcaaaaatcaaaaaagcggtaatggcccatgctgatgaatgctatccgcatgaatgctgtggggtcattgtagacaaggaatatatcccttgtcgaaatgtagcaaacaaatcagatcagtttgaaatacatcctgaagacttagcttttgcagaagaccagggcgagatattagcgtatgtgcattcccaccctgacggaactacaagagcctcagaactagacttaattcaaattgagttacatcaaaagccttgggtaatttgttcctatccggatctagattttcaaatatatgaaccatgtggttatcgcgcccctttagtggggcgtaattattttcacggttggcaggattgctacgctcttatacgcgatttttatagtcgtgaattaggagtcgaacttatggatttcgagcgtaaagatgcttggtgggaagataaagatcatccatcactttatcttgagaattatgagaaagcaggcttctatgaagtagatacgccgcaatatggcgatatgcttgtttgtcgtgttgggcgtactgaacatcccaatcatgcggttgtttggcttggggataatgggcagcttaaatcggaacaaactgagcaatgcataggttcaagtctaattcttcatcatccatataatcgtaaatctgttcgtgaaatttatggccaacaatggcaagagcgaacagtaaagatattgaggcatcgagatgttaaaaaccattaaactgtatggagtattgggacaaaagtttggccgtgaatttaaacttgatgttttaaatacacgtgaagctatgcgtgcattagcagtacaagttgaaggtttcgagcagttcatgttgaaagcacatgagcagggactccagtttgctgtatttcttaagagtaaaaattcaagcaaaaagcgtggaaagaaaagcccatcaatttatgaccatgaatcaaaacgactgattactggagacaatatcagtgaagaccagcttgatatgactacacaagctgaagttattcatgttgtgcctagagtagttggagcgggcgggggtggtggccttcaaacaattatcggggctgttatggtagttgtaggggtggttgtaggggtgtttgctggatggactggtgttggtgcagttgtggcacaagggttaatcggggcgggtatcggcatgatgcttggtggtgtggcaatgatgcttatgccaaaggtcgataatactcaggaccaaaaccaagatggtaatagggcaaaccaaggattcggtggagctgtaactacggttgcccaagggaaccctgttccagttttatatggccaacgtgaagttggtggattcattgtgagtgctggtcagtatcctgaagaccagatgtagaaaatttgttgtgatgtttttttaaggcgctttaagcgccttttttattgcgcgagatttaaacctatggcgattgtaaaaggcgcgaaaaagggcaaaggtgaggcaagaaaacctgtagttgctccagattccgcacaatctaaaacctatataaaaatcttatatggtttaggtgaaggcgaaattgaaggattagccaatggcaatcaatcaatatttcttgaaggaactccactacaagatgccaatgggaatctgaattattcaaacgtaaaactagatttccgtaaaggaactaatgatcaagattacattgaaggttttccttcagtagaaagtgaaactgctgtcgatgtcgaattgaagtcaggtgctccatgggtacgagcttttaataatattgatcttgatgccgttcgtattcgcttaaagtggggaccacttcgccagcaggactcaagcactggtgatgttagtggtataacaattgaatatgctatcgatatacaaactgacggtggtgcctggacagaagtattaaaaacaaaaatatccgataagacttctgcaaattatgaacgagctcaccgtattgatttaccaaaggccgatagtggttggttaatccgggtacgtcgcattacacctaattcaacctctgagtttgtaagcgacaaaatgtatgttgaggcatttactgaagttgttgatgcaaaattaagatacccaaatacggcattattaggtctgcaatatgatgccgaaacttttggaaatgtggcgaaattagctgtagatctgaaaggtcgattgcttttagtaccaaccaattacaacccgcaaacgcgacaatatactggaatttgggatggtacttttaaaagagcttacacaaataacccggcatggatttactacgacctttgtacaaatgatcgttatggtttaggaaatcgcttaaccccattcatgattgataaatggtctttgtaccgtttagctcaatactgcgatcaaagcgtttccgacggacttggcggccaagaacctagatttacatgtaatgtgtacattcaaaatgctgaagatgctttcagtatattaatgaaattggctggtgtctttcgagcgattgccttctgggatggtacaagcattatatgtgatgccgatataccacaagacacatatttcacctatacccgtgcaaatgtggttggtggtgttttcgaatactcaggaacacgtgcacgtgatcggcataatgtagttaaggttgcgtgggataatcctgcaaatcactataaaacagaatacgaatttgttcgcgatgaaaatgctattgctgagtctggccaagtacgcattcttgaattagatgcgtggggatgtacttctcgtggccaggctcaacgtgcaggccactgggctttaaaatccgagcaaaaggagactcgtacagtttcgtttaaagtcggtttagatgggcatattccactgccaggaagagtaattgaaattgcggatgaactgtttgcaggacgtgctaatggcggacgtgtatctaaaatttctgctgatctcaaaagcataaccattgatcgagatgacgttattgctaaagctggtgatcgtctggttatcaatggcgaaaatggcaaagcacaaacgcgaattgttcagtcgatctctggtcgggttatcacagtaacacttccattcgatgagaattcaattgctgtacaaaacgtatgggttcttgatgctcaagatttagcgacaatgaagttccgcgtaatttcaatctcgcaagaagaaaaacaccaatttagcattacagcgcttcagtacaacccgcaaaaatttgatgaaattgataacggggcattctttgaagatgcacctatttcaattattaatccttcaatccaggaaccggttaaagatgttttgattacgactgaaagtcgtgttgatcagggtattaatatcaccacaatgattgtgtcttggatgcaagcgaaaggtgccgttaagtatctggttgagtggcgaaaagatgatggatcgtggatccggttaccgcaaacaggaaataattcagtcgaggtacctggtgtttattcaggtcaatatcaagctcgtgttaccgcaatttctgcttttgaaatcgcatctttaccggttacatcttccttaactgaaattactggaaagcagggattaccgccgaaaatagcttttatacgtgccacaggtattttgtttggaatgaagcttgattggggattccctccaacaggtgcaaaagatacagcttataccgaaattgaagtttcacctgatggcatcaacaatattgctcaattaggattgtttgcatatccgactaccactaccacaatccaaggtttacaacctaatcttagacagttttatcgcggtcgattaattgaccggattggcaatgttggtccttggtctgaatgggtcaatggtacgaccacagcagatccggaagcggttcttgatcttatttctggtcatattaatgagagtgatcttgcccaagagcttcaaggtaaaattgaaaattcagtcgatgtatctgaagcagcccaagctgcagcaaataatgcccaagctgttgctagtagcgcccaaactgcagctaacaatgcccaggctgtggcctctgaagctaagacggcggcctcgagtgctcaatcggcagcaaccactgctcaaacacaagcttcttcagcccaaaaaatagcaaatgatgcgagtgttatagcgaccaatgctaaaaatactgctgatcaggcagctgaagatgcgtcttcagcaataacggcagcagcagaagcaaaaactactgctactaatgcgaatacgaccgcaacgaatgcacaaacaaccgcaaataatgcttcttcggcagcatcaaaagttgcttcagatttaacaacctcaacaaatcagttgaataagaaaatcgctgatgaaactgatgcacgcacagcggcaatttctaaactgaatgatggtctcaccacagaaacgtctcagcgcaagtcagaagatgctgcactgttaaacaatattgagacttataagtcgagcaccaatggcactttgtctagtctgcaaacgcaaattaatactaacgcgacaaatacaagtgcaaatacatcaaaaatcacttcgcttgactctcgtttaaccacaaatgaaggcaaaaccgcagatgcgattaatgcagcggcaacagctcaacaggtagcaaatacagctgttactaatgcggcagcagcagcatcggcagttacctcgctaaaatcagagttgagtacaggcaaaggcatcaacaatatcattgcgcctttttctgatccgcaagaactatcgccttacattatcggcgcatcaagaactgtcgctttagtcaattcgcctatgcgcattaatggtaaggcttatgacgtaacctttaatgcggttgcaggcagtatttattttggctcttcgtcagtttctacggtcaatactgcagcggcaggtgtggtaagtggcggtaagcgttacatgcttagcgcctacttaaaaaacattgatcctacaaagcaagcggaagtttattttacgctgcattggttcaaacgcacgtcagaaggcgcctactcagcaactcaaacagtattaataaatcaggcaactaacaccactcgagtaacaccgtcaaatgagggtggcacagttagctgtaaagctgtagcagcaccaccagatgcagttgcctttgtggttatctgctctggcaacagcgtttataacgtcgctggttcacgcattctcattgacatgttaatgcttgaagaggtcgttggagtcgatgtccctgcttcgacttggactgctggccctgctgatttaagcgctattaaatccgctcttgatgccaatgcttctgctattagcaatcttaaaactcgtgtaacgaacgctgagggggtaattactagccaaggcaattcaattactcaattgaataacagcgttacttctatcaatagcgaacttaccaaaaaagccgatgcaaccactctaaacgccttaaccaaccgagtatcgacagcagagggcacaattacaagccagggcaattcaattacgtctttacgtaatgatttaaatgccaccaatgacaaggttgcgtctaaagctgattcaagcgctctcaattctttggattcaaaagtctcagaaattgatggaagagtaactagcaacacgagtgccgttactgctcttcaagggcgtgttacgacagttgagaacggactattaaccaaagcagacgcatctgctttaaacaactactacacgaaaacagaggcggattctgctacttctggcgcaatcgacaagttcaacagtcaattgacgatcggtggtgtaaacgttgttgcgaactccgaagctcctcgcacttcaaccgccgcaacgaatcgcgaatatttactgtatgaacgtagcgccgaattaaaagcgttctatgacgaaaaccttgagaagccaatcacgatttcgtttgaaatgagcgttcctgtggctggaccagttcaagtttattcgtcaaatggttctgctcaccaattcgttacttccgttaacgcggttatcgtcaatcagtttgccaaatactcagtaacagttagtccaaaagcgcatacggcaagtacaactgtttcgacaattgagttctatggaacgtatggaactggccgtatcccgacgattcgtaaattacaaattgaagcgggcacaaaggctaccgcttggagtccaagccctcgtgatacaaaggctgcaattgacgccaatgcttctgcaattcaaacgacccaaacaaaagttgacaatatcgatggtcggctaaccactgctacagattcgattacgtcactaaattcgcgcatgtctacagccgaaggaaatatcaacagcacaaatactgcggttggtggactttcgacacgcatggcaaccgctgagggcaagatcaccaatcaaagtgattcaattgcatcgctacaaaatagcgtcacctcaatcaatggaacactggcaaacaaagccgattcaagcgcggtcaataacttaactagccgagtggaaacagccgagggcaagatttcaagtcaaagcgggcagattacttcgcttagcaatagccttgatctaacaaacagtaacttgaacgacgtaaacgttctggcgcgactgttatctcttggcaagcctctacgtgacgaccctacttttaaactgggtatgggtggattggcaccatatgctctacagtcaggctctacattaacaagacaagcggtatcggctgacaatccaacagaatctacatatgaggttttattaagagccactaccactttaggttcaggctggtatccaaacaaccctactgtactcggtggaccaaacaaagcgttcttggttaagcaagtaattaagatgcctactggtcaaagagtctatccatacaacaatccactcggtactggtggctttgtccgtatgttaggtaatgcagagggaacgggtaaatttgaaacttattattctattattcagtgtggtcctgatgctagtaagtctattcaaggtcactttagagtaattaatagcactaacccgccagttcctacaacaagtaatccagttgatgtaattcttgcctcttatgaagtatttgacgttaccgcagtaaatgacactattcctaaagcatatagtgatgccatttctgcaaatgcaaacgcgattaatagcttatcgaatagtgtcactcagcagggtaatactattacttctcatagtaattctattacatccttaaataacagcatcacaagcattaatagctcacttacaaacaaagccgatgcaagtgcgctaaataacctttcgaatcgtgtgacagcggcagaaggaaacattacaagccaaggcaattctattacaagcttaaataacacgcttacgaataatgacttgtcgaatcttgttctcaatcctgacttcatcgatcctaaaaatggatggacgtcaggcgtaattgttgatgctactgatgcagcgccgaatccaccgtcgctaaaagcattaaaactcaataaccgtgatagctattacggtccattcgtaaaatgcaatgttggtgacatgttttatgtttccgcgtggtttgcaacgccaaatacatcagcaaccgcttccgcagtaattggatttaatacccgaaatagtgcaggtacttatacatggtacacagtagcagttaaatcgaccgacaagaatgcttggggctttgtggaaggttatttcacggttcctgcgggtatggttgacatccgaccttggctacaagtgagcattgctgcgtcagaagcagcggggcagcaatggcatgttacgaatattcaagttcgtaacattactggtaacaagaagttagcaactgacttacaagcaacatcgtctgcattaagtacgcttgattccaaagttaccaacattgacggtcgtgtaacttctgcatcaaacagcattgtttctcttaacaatagcgttacgaatatcaataccgcactttctcaaaaagcggatgctgcggctctcaattcgctttctaaccgggtaaccactgccgaagggaatatcaccagtcagggtaattcaattacatcattgactaactcgttagctgtgagcggaaaaggtggaactaaccttctcatcaaatctaatgttgttggtacttatgatggcatttcatatccgcatcatacttacaaactcggtgaagattgggaaattggggctacatatactttaatttggtgtgccgagcacaaacgtgggacaggcgatacaaactcatcacttgctgtatacgaaggtggtggctcacaacatctccaagctgtagtaaatacaaatggtaaggttgtcagcaaagttacctttgttaaaaacagcgcagttgcctctggcccaattatccacttctacatgctcaaccgtccgacagccgacaagggtagtgttggtacggtttattgggcggtgcttgtaaagggcgatgtactcacgactgatgcttggattccgagcgcttatgattatatccctgatagcaacgcaaacgcttctgctatcaccaacctcactaacacagtcacacagcaaggtaatactcttacgtctcatacgaatagtattacttcactgaacaacagtatcaccagtatcaacggcgttttgaatactaaagccaatacttctgctgtttcagatctcgatagtcgtgttacagatgcagaagggaagattactgcaaatacatcttcaatcactagccttacagcaaatttaaaaagcacttcaaatggcatcaccatgtctgcatcaattgatgtggatccagatagtgaatggatttactggaccaaaaatggtgaagttgtgagagctgatgacacatctgcacttggaggaaaagtctatcgatttggtaataatgctggtaacgaccatgtgaacgccagatcaaaagccaaacttccttttgatcaaaataaaacgtaccgcatccgtgctagataccgtcgagtcagtggaacgggaaccatttattgtgcggtgtttggaattgcaaaagatggtgtttcacatgttaattccagcaatacagtgaccactgatgctggctcttctaactattttgttacaaaccaagcgcctgcacttaatgcatggcaagaggttacggtatatgtcaaaggtcgagcagcaggagcagctacaggaggctggactttagataatcctcgtcaactgccaaatgctacggcatttataagtgtccaattccttgcgaactactctagtgcagcaggtgaagtagatctggattaccttattattgaggatgctgacgcgattgctgccaatgatgctactgcgaaagctttatcttcacttgacactcgggtgactactgctgaaggtaaaattacttctcaaggtaattcaattacccagttaaacaacagcatcacaaccattaatggcactttatcaacgaaggcagatagttcagcacttacaaacctagccaaccgggtaacgacagctgagaactctattactagccaaggttcaagcattacctccttgaatagctctgtaactggaatattgaaagatattgaagttacagatacccgctcaaccaaccaaccgccatcgtggtattggtcaaattacccgaaacggattgttcgtgaatttaaacaggcctcaacaatcggtctatcaggaatggggacatatgtttcgcttgaaacatacgtttattatagcgacgctactggtggacctattattcaaattgcacgtggcacagattcgaaactgaccgccgaacgccgaagtacaagtacatcaacatggggtacttgggtacaagacattaaggccataagtgatgggcttgcaaataaagctgaagcttcagcactttcatcacttgactcaaaagtgtcggttattgatgggaaagtttctacacaggcctcaagtattactactctgcaaacaacagtaggcggtaatacagcctcaattcaatctcaacaacaatcaattgatggcctgaaagcaagagcaacattgaagctgcaatctggcaatctggttggtggcgttggtattgaaaatgatagcaaaacggttgacttcatcattcaagcaaataagtttgcgattggtgcaccttctgatgtcactagtgctgttacaccaaaatacgcttttacttatcaatccaccccaacgactttgcctaacggcacagtcattcctgctggcttgtacttagacagcgcgtctattagctatatcaacgccaacaaaatttatgcagatagtttaagtgctattagtgcaaatcttggtacctttacctcattggcagatcaatcaaaaccaaatggtgctaggactgtaattagtggtgagaggatcgaagtttacgacgaaaacaatgttatgcgtgtacggattgggagatggtaaatgcccacaggaatgataataaattctgaatcaggggaagttgtttttgatggaactgtgaagatccctaaaatactagggaaggttctaatcgagaatggacaaacttcagcagtattaaaccttaacaagccacttgatggcacgatgttttttattccaaaaggattagcaactacagtcgatccaatctatgcccctttgggaattaactatgaagtaagtcttagttctaacaagcaggttgtaacggttaaatacatcgcgaccagtgagcagccaaaagcagggactgattttgaagtttatattggtgaatattgatggataactatttcttagtaaagaatgacttcataaatgctattgatgatgactatttcaatcttgcatttattagaaaacaacgttttaacttcacatctgaacctgggattacctattactatcgtacttttgaagtagatataacagggatagattttcctgttattgcaattagttgtgtttgtccttctgcttatttaagtatgaaagccaatacgctttctattgtttgctcagcaagtaattatgatggtgtggctaattcagttagcaatttaaataattcatctaagtatttagatgtgtttgtttttggtcgattgcctagaagcagtattccagaacatggtattggtgtagtctgtttagatgcatcaagtaaagtagtttattacagtggtgcagagtatttgaaacccataaaaatgtttattgatcccaatacttatcgaccaatgtttaattcaaactacaatactcaggtcgagtatttgccgattggcaagtcttatgcatgtattcccttaaatagagtaaatactgtttattcggagtggacgcctgaaggtcaagatgtcatagcaatgtcatcagtttgtgctattgagggcaatactattacttatacctcaaatcaggtgcaagtcgcacaagatattagtgctgtttacaatggatattgtagacatatgtacatgttaatcgatgtatcgaactattaataaacctttaattatcagcacccaattcgggtgcttttttattgcctacgatctggaggatggcatgcatgaacgatcagacaaatagtgtagttggagcagctgcaagcacggctgccgcgactgcaacaaaattcacttatggttatgtagtgggagggagcttgatcggtgttattggcaaaattgattgggctgtagtcttttcgattttaatcggtatcgcaacctttctgacgaatctctatttcaaaaaaagagatgataagcgtaaggatgagattcacgagctacaaacgaagcaatatgagctaactaagaaacgattggaagggggttcagatgacaagcgaacagactagagcttatctggcttttgcacttgtggcgttaatgttcgtactggttattgctttattttttgtgaatatgccacgtgagaacagcaatttaattaatacagcattgggtttcattgcgggggcaatgacaactgcctgtggattctatttcggaagctctgaccaggaaaagaaaaataaaactgaggaatcaactgagcagtaattaacttaactctaaatgccgcctacgggcggtttttttataactgaaggaaaacgaaatgaatatcgaacaatatcttgaagagttgatcaagcgtgaaggtggatacgtaaataacccggcagaccgtggtggtgcaactaaatatggcatcacacaagctgttgcgcgtgaaaatggctggaatggcaatatgaaagatttgccgcttgaatttgcaaaaagtatttataaaaaacaatactggttggaaccgcgttttgatcaggtaaatgcacttagtccatctgttgctgaagaattgttagacacaggagtgaattgtgggcctaactttgcaaagcctcttttacaacgtgctttaaacctgctcaataatcaaggtaaagctggttggcctgatttgaaagtagatggtgtttatggctcggctacactgggtgctttaaaaacttatttatcaaaacgcgggaaagacggcgagaaggtgttagtacgcgtgctcaatatcatgcaaggtcaacgctatattgaaatttgtgaacataatccaaaacaggaacaatttttctatggctggatttctaatagagtggtgatttaaatgactcaagcagaaaaagtaactgagcttactccttatcttgagtactggagcagtggcatctatatgtttaagtgcccgggttgtaaatatttacatccatttcatgtgaaagaaggtgcacatcataatggcagtacttggggttttaatggcgatataaataagccaacgtttacaccttctttacttgttaatgaccattgcccagcgagtcgctgtcatttgtttttgactgatggaaagattcaattcttatcagattgtcatcatgagctcgctggacaaactgtcgacatggtaccgatagatgtttaaagttttattgctgtgtattctgctttccggatgttcagctcatacgatcaatagtaatgtgagtgtagccatttgtgtaaaagccctctaaggagggctttgtttgagaaaatatttgctcatttttaataaaatcaattgattttgagcaaaattattcacatttaaaaactaatcttgtttattagtttcattctcaactttgacaaacataacgtttaaagcgcctttcctaaatggagactcatacgtcaccgctttataattaggaggcaaagttgtttgcaaagaggttaccgccgtcgcagtagcattaggtccaactctgcaaatgagctgttgatccgaaggtgttggtgtcggctctttctttgtgccaaataatttacttaagaaacccataacatccatacttcctaattttatgcatttaatgatttgttgagctgctgaattgcattactttgttttttaattcggttttcggcaatatcaactgtaaagcttaatcgttcaagcaccgttgtaaggctcaaatatttttcacgctcttcatcagctaaggtttcaataaaagcctcttcaggagacatggcggcaagtctcatcttatacatagatgccattgccaaagcctcagatgacttcagtgaaagttggtgaagtcttgctgccttatttctttcaatatttgtattaaccattaaagctataacaaacaaggcaaccaaaactataaatacagtaagcatgtactagatactcatttcagacatgttttaataatattaacccagtattgaatgaaatgctgaattattaaaatgatccttcagataacttatgagcattaattgacattttgtaccaactggcagaagttggccagtcattctgcagtatttggccaactcatcaattttaatataaattgttgaaaaataataaacacaataaaattaatataattcagtgattggcattttattacaataaaacctattccgttttagtctccttaaagatcttttctagcaactcaagcatttcatctgaaagttcttttcttataatccactcagtctcagtaatttgccacgcaaccccatgagttatattaaaagttggtgttggcacatgtgcatctcccttatgtttatctgctggcgcaaactttgctaaaggcatccttattcgcgcaagctttaattttaaagaataaatttcaggctgatatttattataaatagccatttctggcttttttttaaaatctttatcattcagcaccctaattatttcatacgctccaaataaccaaagagttgcttgcgacaaatgctcaatagtatatgcattaaaatctaaatctcccttatcacctttcataaggttttttataataattttatcgaaaaacactaagcgtgagtccagtctccctaagctttggaatgtggagataaaaaaaggctctacttttcctagcgcaaaagaagccttgacccatctatttaatcgatcttcatcaataagactcatatatgctaaggcaaataaaggcgccatttcttctttttgatctatcatgctatgcccagttaaaaataatattagaatataggataacttgtatttttgagacgttgatatgacgagcgaattaattaaaatttacaaccatgcagattctcgtattgctgatctactggctgaaatagacaaaaagggagaggtcacaaaaatctacgacctcaatggtaacgagctaaaaattaattttctgcgagatgaagtttactataataaagcttggtggcattttcagaaaaaacaaaaataaaattacttttcaatatgatagttctcatcaaaataatagttatcagaaatatctaaccacgcttttaattcatgctcaaattcaagtactcggtttttaaacaaccgaataactttatttttcttaaagctgaaatgtgaagcttcaggtggtaattcactccagtctacttcaccatgttcaacaaaccagtcctcccaggcaatttgaatctctgtgatatagaactcttgcttttctttgttccatgcaaaagggaagggcgtatttagtttcttaacatgttttcggatgaagtacttactttgtttatgtgtctctataaatttttccagttgagttttgataaaattgtatggaacatcaatttctaaattttccgaaacttcaaaggcctcaaacgtgtcaatttctgagattacccgttgtttcttattccattccttatagtgattattataatcagcttcggctacactcatagcttcagcaaaatctaatcgacgtccacgttttttcagattcacataccgttttaaagtattccatgattcatgcaaggtgatcgtttgtagttttggaatcgaaaacccgtcttccgcatatcttgtagcagcttcatgccgtaaatcatgaaagcgtaaatcctcaatttctagcgcattacaagcacgtgtaaaataaacagagactgttcttgaattaaccggaataagtaactgatctgaataaccaagttctaagattcgtttacgggtatcatgctctaaaaatttatttgcgagctcaattgccttaggctcaaagtgggcatatttgtgattaccttcagatccatcgggatgctttgcatcacgtaccagccattgtgaatttgcccgatcaaagtccgtcaaacgtagagtacacatctcatcttcacgtctacccgagtaaatcgcgaaccacataataagatgcattgggacagattttttcttacgcttccatgttttataaaaaaaagtcgtcaaggcttgcaattcttcatctgttggcaggcggtcacgtaatttgctctttgtaactattcgggccttggttaagccgattaatgctttctcaaattctgaaataacattttcaaggggctcaccccaaacgaattgagcgtggaccaatacagcttttatatggcttaaatctttcaatgcggtggaaggtgcaaccccatcacgaccagtgattggatctcctttacgtctccagatagcaaagtcagaaaaatcttgtcgtgttaatgaatagatatttttctctgaaatctctaaactagcgataaatttcaaagcacttgtttttgattccgcgaaattatccgcctcatctaaatattgagtaataaattcagctaaagttttatgcttaagttccgcatccggatttagcatcttttctggattcaactcaatttcagcttcagttctttttatccactcatcagctagtgatttcttactgaatgtctttgatgctttatacggtggataaccttcacgttgaactcgaacttgtgctctgtagcgtactgtgccgtttttaagttgacgtttagtgactgttcccacggaatttgcaccacaaaatatttaaggtgcaaatagggtgcaataaaagggcgctagaagtcaataagaggcgatttaacgaagttaaacgaggtttgaagaattgagcaaaaacaccgttataaaagaattgttcgataaatcaatagataagaaactttgggtcgcccctatggccggtgtaactgaccgtccatttagaacgctgtgcaagtatttcggtgcgggtcatgcagtcagtgaaatgatgactgctgacaagactttacgtatgactaaaaaaagtctttatcgtgctaattttgatggagagttagctccaatttctgcacagattgctggttccgatccagaacagttggctgaagcggctcgttaccaagtcgcaaatggcgcgcaaattgttgatatcaatatgggatgtcctgcaaagaaagtatgtaataaattagcgggttcagcattattacaagatgaagatttggtagctcgaatattagatgcagtcgttgcagcagttgatgttccggtaactttaaaaacccgtttgggatttttaaatggccaagagaatattctacgggtggctaagcgtgccgaagaggctggcatcgctgcattagcactacacggccgtacgcgtgaagatatgtatttaaataccgcccgttatgaattgattaagcatgttaaagaattaatccatattcctgtgattgctaatggtgatattgatagtcctgagaaagcaaaatatgtactggactatactggggcggatgcaattatgattgggcgggctgcacaaggtcgaccgtggatttttcgtgaaattgcccattacttaaaaactggtgaacaccttgctgctccgaatattgaagaagttaaagaagtgcttttagggcatttgtctgagttatatcagttttatggtgaatactctggttgtcgtattgcccgtaagcatattgcttggtacaccaaaggtttacgctcaagtaatgagtttcgacaaaacatgtataaagttgaaacgactgctgaacaagctttagttgttgagagctattttaatcaattacttgctgaaggtaatttgatgagcgatgttcaggttgaacaggttaatttattagatactcactaaaataaagcaaccagtacagagactggttgcttggaatttttatctattcactgtctagcatttcaacgaccagttgattaaccagatcgggtgcttcaagttcacgtatttgtgcaacgttacttcctgcccaaaaagcaccaaaaccgtaatcttggtgtttgcttgcaatagcatttagttgctttgctaaatcataggtataaggatattcaggttgtacagggcgagtaggtgaatcaatttttgtatgccaatggttgagtatcccccgagcagggcgcccagaaagactagcactaatctgtgttacaggtttactaaatagggctttgcggtattcggcagaagcatttgaagtttggcattgaacaaatgctgtccctaattggactgcggctgcgcctaagcccaacatatgtttggcttgtaagccagtcattatgccacctgcggctacaactggaagtgtacagtgctgcacaatcagttgaaccaagtcactagttttaattgccccatcaaaagtctggttgaaaatccctctatgtccgcctgcctcaatcccttgggcaataataatatcgatgcccgctgcctcaatagcttgagcttcgatcaaattagttgccgaaaccatagtcaaaataccagcctcttttaaagctttaatttgatgcggatgcggaataccaaagtgaaaacttactgcttttggcttagtttctaaaacaacatttaaaaaatcatcattgtctaaaaaacttggatagatacagtgtaattcttggggcggttgagcaccgaatttttcaaaatgaggacgtaggtaatcaagccattgttttgctttttctacattaagctcagtcgattgatgacagaaaaaattaacttgaaatgggttttccgtgagcgcttgagtttttaaaatttgttcacgtgcactttgcggtgtgtttgctcctaagcctaatgatccaaggcctccttgatttgaaacctcggctgctaattcaggagtagagacgcccgccataggagccagaaaaattggatgtttgattgcaagttgttgtaataggctcattttattcacctcaattctttctcttcaccataacgtgaaaatagaatgaagagcaaataatattggctatttaatttttaaatattaagagtcttatttaaaaaactctcttataaaggagtgacattaaataaggaaccaatccagcttgaaaaagccatcgctaaaataccccataaggtaatacgtaaactacctttgattttagaagtgcctgcaaaataactcgaaagggcacctaaaattgctaatgccgcgatacctgtaataagcacacttggcataattaaatgctctgggctaaacaaaatggcaagcatagggaaaaatgccccaaatgaaaatgatgctgctgaggagagtgctgcttgaattggttttgccgccgtattttcatgaataccgatttcatctcgggcatgtgcacccaaagcatcatgagttgtaagctgaatagccacctcctttgctagttcttttgaaagtcccctagaaatatagatttgagttaattcatccaattctttttgagggtatttttttaattcttttgcctcaatagctaaatctgatttttcaatatcttcttgagatttaaccgaaatatattctccggcagccattgaggttgcgcctgaaatgagcccggcaatacaagtgataaatagagtatgtgagcttgccccacttgcagccatccccataattaagctagtcactgaaataatgccatcattagcgcctaatactgaggctcttagccaacctgagcgttgaatggcatgatgctctgtatgatgtggaaaagccatgtgtttttccttattaatgttttataaatgctatgaaattttacaatttattggtcaaaaaatatgtcattattataggaaatttagggataagacagaatagatcaataataaaaatggagattaaacaattattttaaaacatccttaacctaacttaacgatgtaacttattatttttaattataatatttattgatcattccagagacttgccctccctaataagtctaatttactgtagaggtgaaaatgaaaaatatcaaaacaataaactctataacacattcaatattactgatgggagcagtgatctcttctttgggaatgatcggtataagctcagtttatgcacaagagcaagtcgaccctgcatataagcccggtaaccctatttatgataaatgggatagattttataaaattgaacagtctcaaccgcaagaagcagaaaaaatattagttgagcttagtaaactgacaccaaccgatattaaagtctggaaaagtcttacttatttacagattcggcttgaaaaaagggtagaagctttacaaagcttaaggcaagcaagaaatttagctcctcaagatgacaccttaaaattacaagaagcttatttgctgaatcagcagaaaaaagatcgtgaagcattggttttatttaaagagttaagttcctcttcagaccctgaaattgctgctaaagcatctcaggcagttaaaaatttaagtgggggagaagttaaaccatattttagagatatttattttgcaccgtcttatgagtcacgttatgacgatgtgatttttcctttaaaaatgaggtatggcaaaaacatcgataacgggcgagcccaagtatatggctttcttaatttaaaccgcgatactcaatcacaaggtggggtccgacctgaaattattgatgaaaatgcagccactttaggggtgggggcaaattatcaaccatggacttccattcctgtgcgagcctatgtcgaagttggtggaagttatgacttgattgatagaaatagaaagcgatttcgtgagagtgttgtaggcggtgtaacgggttatcaagaatggtattcacaatcaaactgcgatcattcactttgtttagataattattttactgacttatatggcaatgtcgcgacttattcgagagaggactataacgttattggggacttacgcttacgcacaggtttaaatctctataagggtgagagtgggtctgtgcaggcttatgtgaaattgcatggcttagcggatagcgaagatgaatattacaataatttatttgaatatggcccaggcatttcatggcagccttttaattatcaaccgataaaactacgggttgaacgtctatatggcaattattttaaagacgtaccggttaatacaaaagatcattacaacaatactcgtgtagaacttgttttttataaggatttctaataatgaagaaaatttttatttcaattgtatttggtactcgtccagagctcataaagttggctccggtaattttattagcaaaacaagactcacgatttcaggtagaagttatttttacaggacaacatgatgaattagttcgagatgcgatagatttctttggggttgaaattgatcatcgtcttaaaattatgaatgctggacaaagcctgaatcagcttttaattcatggcttaacgcaacttgaaaatatctatacagatagtcaaaaaagagatgcaattgttattcaaggtgatactacaaccgtattagctgctgggctagttgcattttcaatgaagattcctgttgcccatgtcgaagcgggtttacgttcttatgatttagatcatccatttcctgaagaaggcaaccgccagttagtttctcgtattaccaaatggcattttgcccctacagaacaatcaaagcgtaacttgttaaatgagcagattccaccttcattgattacagtgacagggaatacggtagtcgatgctgtgtatttaggaaggaaactcatagctgaaaagacgggtttgaaaaatcaacttgagccttacggaattgaattaaaacaaaatgataaagttgtacttataactgctcaccgccgtgagaattttggcgaaggaattcagaatatttgtaatgctgttgagtatttagcaaaacatcatcctgatttacattttatttggcctgtacatttaaatcctgctgtacataatgtagtgcacgataagtttaaaaatcatgctcaaattcatcttgtgaagccactcgattatccaagtttattggccgttatcgaccgctccacctttattttaacggactctggtggtttacaagaagaaagcccatcatttaataagcctgtcttaattttaagagacacgactgaacgcccggaagtggtagaggtgggagcaggggtattggttggaacaaatcagcagaaaattattgaagaggctgagaaacttttaacggattcgcagcattaccaaaaaatggctcatgttgaaaatccgtttggtgatggatgtgctgcccagcgaatattagatgaaattgccagaacttataactagagatcatttattttgagttttctggtccgtttatggtggcgggtgtgctgccataaacgaatcgataccatagaccgacaatataaacggaccatcggcccatatagtgggggccatcaaaaatataaatttttttcccttcatacgccttaatttgagagataatttcccaaggataggctgcacgaaattgaccatttttcttggttcgaaatgcttctaaaacaataaccgttttatcttttccaagtgtctgctcaagttgatctaaaatgcgtctagcttgttcgggagttcttactccgacacctacaccatcttggaaaaaaacgcctgcttgttgaggaagccagcttttaacccataaatcgtagttttcgggttcactttcaccactataaacactaacccaaataggtgagggtaatttttccaaaacatgtcctaaggtacttactcttagccatgttgggtcggcttctactggaaaataatagccttttaaagatgcatcattttgttcttgaataatttgtgcagatttttctcccaaagcaacgacattagcacgcgcttcgtgttcattatattcacctgctaaccccaatataagatttttagcccaaggttgctgtttaattttttgtaaatcaatggctttttcccattgaggaagattggagtttttccaccaagatttagattcaacgactgaccattggggaacaaaagtatttattcctaagtaatgccagtttcctttaggaggagtagtatcattgtcaggttgccagaagataccctcaataatgggaggttgtccatgatttttgaacaaccccgcataacccactacactacatataattaaaataataaaagcagttattttaattggtatctgttttttcattattacgtcgtaaccaataccacaagaagatcactattatcataattgcagagataatcacaactaataaaaagaatgatgattgctgaactaatggcgctttttgattacctacaattaatttttgaagaacataaatattgccgttttcagacaccagcattttggtcacattatttgggattttatgctgtatttttccccataaatgcataaaggtttgtgcaccgttttcagagtctgtaattacatcgaagcggttattgttataacttacgataaagccattcgctgctgcgggtgcataaataatattttgatgcattaagacttgttgctgataaatctctttgttcactctcacattcactgcttgtggggaagtcggagagaagcgtactaggttcactggcattggtgcctgtgtcagcagcatgtttttagcgacttgtcctaaaataatggcaatatttaatgcccctgattggtcatcaattgcaatcgttggcttggtggctaaggtcattgaaagagcagcaacaccatttttaagtttatggggaagttttaccgttgatttggcggtatcaacccaaagtgagccgtgagcattgggtaaacattgagaattggcaataaccgagttttcaagtttcaagctaaagttggttgtatttgaaatttccttggcaaagatgttgaactgtcggtttacagggtcggatgcgagatccgccgttttcatacttcctgcaagtcctccatcaatccatgctgtaatatttgaaccttgtaatagtccactttgaatacgaagtgcgatttgcccttgcagaatatcagtaggttgccatactgccggaaaatcaagaaataaattcttttcggcatgatttagtcgaaaatcctgaatacctagatctgcaagcgtatcaatttttttaaattgcgcccaagctggtgctgagattgtagttggaaaaatagcgctacccgtatcaagctgttgcacataagttggattaattagcccgttaatggcagcggtaagctcttgtggagtgtgataagtaatagatagcgtcggtacaccttcagccagtttagcaatttgtactaaggctcctcctttgagtgggcttgccgaacgaatcacttcaataataaagttcgtttcaggatttagattggtttggcctgaatcaacccattcaattggcgttacggagctccacgaacttactaatcggcccaacatagaggcttcggtaatttctttacggttatattttaaaattccgacaaaaggtgtaggtcgtctagcctgagggttaaataaagcgtccggtagatcttttaaacggtactcatttcgaataggcgtaaagtcgagttgagaattactcaaataagttaagtgatcaatatcttctgtacagaatgtttcttttgtttggttaagcgtcgttggttttgcatattgttgaataataaaatctaaacggtgaaaaccactctgactggcaggaatattaaatttgaattggccatcaccattaagcgtagtgttataaatgagcttatcgtcatatttgacgagtactgttgtgtcattttcagttgagtagtcactcgaaaactgaatgttttgccattcagcaccttttccaatatagaaaaagtgaggctcgactgtatatttagtcgaggtactaatatcgtcgagtttccatgtataagcatgagtagacatgccaagcaaaaaactggtgctggcaaggagcacttgagctgtttggtaaagatcaaaagtctttttcatttattttttctccttgctacgttccgttttgtaccattgaagggagttgccctgtattttattttttagcatgtcgaatgcggctttaaacacaataaataagaagatttgtgagtaacttacgtaagataagacagaataaaaatagagttctggtttaactttttctaaagaaagcgtaaaccacatttgtgctacatagagacaaaatgagagtccccacagtagtgtaaatggaccaggaactgaaatacctgcaatatcaagtaagccaagcgttaaggtaatatgactccagaataaagccggtacaaaaaggatatagcacataatgttatttagaatttcaattccgattgggaatggggttctgagtgctacaggtaaatatttgcgtgttacataaaaattaccttgagtccagcgtgagcgctgtttaacgaatacacttaacgaaggagggtcctgttgccaaccgattgcatagggaacccatttaattcgtttttgtccgataaaaattcggaaactcatttctgtatcatcgactagcgatttttcatcaaaaccgcccaaagtctctagagcatcgcgccagatgacataatttgttcccattaatgttgatagttcaaaacgttgccagcgtccaccttgaaagatccattggaaaaagatgaattcaatcgcaataaaacgagtcaaaatactatcttgccagttacgggttctgactttgccatttaccgcgactagctttttatcggctaacaaggtttgggcaagtaatcggacgcaatcgggttcaggggtgctatcggcgtcgtaaacaacaattaactcacctttggcatggggaagaccattattaagcgttcttgatttacctttaccacccatccctttgggtacattgacaatttttatgcaaggataaatttttgcgaggttttctgcgatttcaagggtgttgtctttggagccatcattgatcagtaagacttcataagactttgccggatagtcctgttgagcaatggcatgcaaagtgtcctcaatcacaacgccttcattataagcagggatcaaaacacttaagactggccatctttctggtattggtaagttttgcagctctttttcagccgttttggaatacttccacgcttgatagcttaaccatgcccaaaatgcttgtggaatccaaatacctaaaaagccaaataaaaacaggatatcaattggagccatttttacggaccctcctaataatagaagagatgagcagcaataataaaattgcccccaccactaaggagatccatgaaatatagctaccaaacgtgccgagtagatccggatacgtcgttgttaaaatcaggtcaagtggaacaacaacaatacttaatataataaatatataacctataagattcgtacttacatgttcaggagtactctcataatcaatattattaaagttccaagaaatgccgagttgaggatatcgaatattagatagaggtaaatcagcagggggattaatgataatttcataacctgaaacatgaccgttaaaacccttggccgagtaaaaaaaatgttggccttgtctgacttctcttgagggtaatggtaaatttgctgaatttagctggataatataactacctgctggttgagaaattaaattttcatcccatcccgtactcacaaaagcagccattgggcgtaaaccaatagcggtcgaaaaagttgcttttgcggcaaaatattgaggttgttcagttttaaaaagcacaataggaatagcaccttggcttactgcttcttttaacaagaaatagtgaggaaaaccgaatacttcgtctggcaagataatgccgggtctaattccgttatggataaacttttggaaactttcagagctaatctgatcaatcgtaaagacaggccaccatgtatcttggtaagggaaaaacatggaaagatcactaggactttgaacctcggcttttatttgctcagctttaatttcgcaatgataatattgtcgatagaactgttgtaatgtggcatctggatattggctagaggcgattacaattccacaaatattaagaagattagacattagctcatctcctcgggtggaagaggaacaattttgtattccacctcaagacgcaaggtcgtaatttcttttaatttttttaagaatacagggtcttcttctgttttctgctggcgaatcataatactgtaaatattttccagatcatcatctgcaaactggaaaacaatctcgttgggttcatgttggctcaaaattttaatcatttcattttgagttgttttccagacatcatcgcctaacatttctttaatcagactgcgattaagaattcgaatttcgaatacttcataatcttgtacattgtggtgatcaagtaatttaaaaaaactacgctgaaagtattttaaagcactgagcgggaaaatatcgcggcgataatttcggtcatagctttgaatatcacggtatttctgtacattaatttcaatattgtggcgtacggcacttagaaagagcggtattaggggaataatgaatagtaaaagtaactgacgttcaatatgtgtttgtgcgcctaagtcgagtaaaaagtatacggcaactccaataaaagccactaaacctacaattaaagacaaaccgacttctaaaaaagcacctgaaattaaaagaagaagaataaaaatccaacttcctctaaaactcacaggcagccactcgtatgcaaccattcccataaatagatgagctgcgataatccataagacgagtgttctaccggggtgtttttgttgcatgtggcctatgctaccttttttgtaatgttaatttttttatacttttataatgaaaggtgttgatttgcgaagtagttgttgtttctgtcctttttaggtatctattatgtttatttgtagattaaagccactgtatagtcaaaccttgttattaatttttcatcaaaaataaacagagcagactcaattgttatctaaatattcttgaaagtttcaattgctttaaggcgtgtttcttttaaatctactatgggttttggataatttaaaccaagatcggttttgcttgagtaggggtcatgaatcgttttattgtccaaatgagtcaattcttttatccattggcgaatatattcaccctccggatcaaacttctttgattgagcaattgggttgaaaatccgaaaataaggtacggcatctgttcctgttgaggcacaccattgccaaccgccattatttgcggcgaggtcaccatcaattaaatgttgcataaaccattgttcaccaatgcgccaatcaatcaaaagatttttacataaaaacatggccgtaatcatacgtactcgattatgcatccagcctgtttgtaaaagttgtcgcatcccagcatcaacaataggaataccggtttgacccgtttgccatgcggttaaatgttctggattatggttccatttaatcttctgagtatctttcttaaacgggatgtgtttagaaacatgcggaaaatcaaataaaatatgttggtagaactctctccaaagaagttcgtctaaccatgtttgttggccttcattgactaagtgaaagttgccatgttgattgcgaaagagtgcttgtaaacactgtcgaatagataaaataccaatatttaaataaggtgaaagcttacttgtagcttgtatatgaggaaaatcgcgctcgactttatagtgacaaaccgattcttcaataaattgatctaattgttctaatgcgtattgttcgccaacaggccataaatcttgctgttcttttgagagagatgagcaaaatagtttttcaatttcgtctaaatcaatatttttcccctgtaaaaaatctagtggtacttcattttgtttattagggaccggataacattgagataaaccgcttgtgtcgagctttgtataacaagcttttttgaatgcactaaatacttgatatggttgttgtgattggttacggattgaacgtaaaggaaaaatagtacggtcatggaataaaaatagttctttgccatgccgatttaaatagtcttgtacatttttatctctttttaattcatttacgcctatttcgatattggcatacacgttttcaatattatatttcttgctgaaatcagaaataaagtttgcgatctctttccaatagggaatgacttgaataactagtggaatatgaagtgctgctaactctttctgaagcgttctgagttgtcgtaaataaaaacttatttttattggagcatcggcgtgttgtttccattgctctggcgataagatgactaaaccgagtgaaggtccttgctggctggcgtgccataaagctgcatgatcatgtatacgcaaatcttggcgaaaccaaatgagctgataagcatttgacatgcaagtccctaaaaataaattaactctatgaatattatataaattaaagacataaaaaaagcaaagccgaagctttgccttttattatcttctaaaagaagacttagtggtggtgaccacccgcaccgtgtacgtgaccgtgatctaattcttcttgagaagcttcacggatttctacgatttcaacttcaaaagttaaatcttgaccagcaagtgggaagtttgcatcaacgataacgttgtcaccttcaactgctttaacagtaacgatttgaacgccgtcatctgtttgagcttggaattgcatacctggttgaatgttatcaacgccttggaacatttgagcaggaacttcttgtactaggtctgggttatattcgccataaccttcagcagctggtacgttaacagtgaatttatcaccaacagtcttaccagttaatgcattttctaaaccaggaatgatgttgcctgcgccatgcaaataggcaagtggttcaccttgagattgatcaagtgtttcaccctcagcgtttgttaatttatagtggaatgaaaccacgtggttatttgcaattgcagtcatgtttttgatccattcaatcaattaaagcgtacatcataaagtgaaaaataaattttgtagactacaaaatctcaatctttaacactttttctaatgcgtttttatctaaatagggatgaacttaaaaaattcaactcaatacagcttaatttttggtcgtactcgtcttgtaagtaaatctttcattgtgagtagtccagcttgagtgtatccgtgaattgttgcttgatgtaaacggtataaagatacatacatcgttttggcaatatatccttggacactgacatcccccagtaattctccaaccgctttattacgacttaaagacacaagtgaacctttgtcattaaaagtaaacatcggttgtgatcgaccatttagtctagcagccatagcatcgactaaaaagcttgcttgttgactagcaacttgagcgcgtggtccgagaggcgggtgtcttgcatcaagttggcaatgcgcacaatcaccaaatgcaaatacattaggatcggaataggtctgcagcgttgcatagaccattaagcggttaatattgtcacgttcgaaatcgctaagactttcaagtacttttggtgcttttaccccagctgcccataccgtaatatcactgttgagctggttaccattactaaaatagatacagtgttcatcaattttttcaacccggtgcttagttaaaatttcaacacccattttttgaagctgttttgcgctatgttcagctgttttttcacttagggcagggaggatgcgttctgaggcctcaatgagtgtaattttgacttgattcggatggatcttttttaaaccatagcgataaaagtttttggtcgtttcaatcagttcagccgcaagttcgacacctgttgcccccgcaccaataattccaatatttaatgtacgttgatcgggttgattttgcgcttcgatatataaatgtaaaagatcttgctggaaaatatccgcctgtttacggctatcgaggaaatggcagttttcacgaacaccgggtgtattgaaatcatttgatactgaaccaagcgctaaaaccagtgtatcgtaactgagttgttgaatatgggtattttgttctttagagacttgagggggaattaaatcaattattttcttatctttatttactgctgttaatgttcccaacacaaattcatagtggtgtttctttgcatgggcaaaataattggtttgctcttcgtgaggatttaaagaacccgccgcaatttcatgaagtaatggtttccagatatgagttaaattttggtcaaccaatgtaattttggctttaccatttttcccaaaagtttcaccaagttgtgtggcgagttctaaaccaccagcaccaccaccgacaataacaatatgatgtaagttttgggtcatttttatcacctaattatttttctataaaaaaaagatggctgaattatgccatcttttctttataaaatttattgtgcatctgtgcacaatttgatgtttttagtgcgaatctatagggtagagttttgctgcactgtgctcacttgatgaaaagattgagaataggcttgagaaccacatcataattctttggaaaatatttgcttcttcaatgtgtacatcattttcaatttgaagactgcgaatgagctggttgttttgataaattgaaactgttgccaaattcatcgctttcattaacggtgctgttaacttttgctcatttaactgaatatttacacgtgtttgagttgtttcaagtggagcaataactttaggttgttgattgctatcaagaacttgaatacgctgtgtagcataatcaaacgtatttaaatcaattggtgttggctcagcatataaagaagtcgtaacaatggttggctgcttagtttctactttaaacatttttaaagttgatttaataacaggcaattcagcaattaatttttgctcaggaataactacttcatcacgtgtataagcataagcaagattcattaatttatctgcaatttcagcacgtttcacggcacttggtgtacctaagacaattaccagtaaacgtctttgcggtaagttcggtgaaaatgaagggcgtgaagctgttagagccaagttataacctgctgctttggtatagccagtttttaagccatctacagatggatcatatttgagcgcaaggttcgtcgcatggtgaaaacgttgattgtagctaaagctcggcattttcgaataatgtaaatattcaggggtctggtgaatcactgcctgacttaataagctcaaatcatgagctgtcgtgtaatgatccggcattgtaataccagcaggattactaaagtgcgtgtctttcatacccagtgcttgtgcttcttgattcatacgctgtacgaaatgaggcacatcaccagaaattttttcagccaaagtcacagctgcatcatttgcagacataacaattaaaccagccaagagctgatcaactgaaatttgctcgcccgctttgaggtacatttgtgattcatcccactgcaccacgcttacgactggtgttgcagtaatgacttcgttcagttttaactttccagccttaatctcttttaatgcaatgtaggccaccatcattttggttaaagatgctggcgcacgttgtacatgactattatgctcagcaataatttgaccagattgggtatctacaattgtccatgcagcggcttcaacactttcagaagcaatattaagtagagcagcattggtaagagtagtacagaaaatactaaacagcgtaaaaagagataggaagaatttcactaggtgaccttgacgtttactggcaaatacggaacacagatgcccagcatgctatgccttttttttgtagaaggctagtgtgaattgttgccaaaaaatacatctacgcaagtcgatacaaaaaagtgataatctaatgtgaaaccgttcttatttttaaattgaagaatttatgttgcattatcaaattgagttcgatgattacaaacaacaccttgttcacgtgacaattcgctttttagcgaatccaaatcaggaactatggttaccaacgtggattccgggcagttatctcattcgagagttttctaagcacatcgaggcagtaaaggcctatgatgaagctggacgcatgctcaatattaaaaagactgaaaaaaatcgctggcgtttatttaacaccgatcacgagttaattactgttgaatatgatgtttatgcatatgatttatcagtacgtggcgcttatgtagatcaaacgcgtttatatattaaccctgcctgtgtgtgtttaggcttagaaggccaagaacaatctgcatgtgaattagaaatctttttgccggatgaattaaaacactttcagttagcaacaggattagcttcaaaaagtttagtaaaaggacgttttactttaaaagctgatcattatgatcaactcattgatagtccatttgaactggctgatcaaacgcgttttagcttcgaaacgcatggaattgaacatgagtttgtaatttcaggtactcacgctacgaatgttgatcgtttaaaaacggatattgaaaaaatttgtgcagccgaaattgatctgtttggttcggcaccgtttaaaaactataccttcatgaccatggcaacagggaatagttacggtgggctagagcattgcaatagcacaagtctgattactccacgagatgatttgccgaaatcgaatgaacctactgaaccttcgaaagattatcaacgtttcttaggtttatgcagtcatgaatattttcattcttggttagtaaagtttatccgtccagaaaattttgcgaactacaacctgcatcaagaaggctatacctcgctactgtggatttttgaagggtttacttcgtattacgatgatttaattttattacgtagtggcgtgatttcccaaaagtcttatttagatttgttgaagtcacagattgatcgctatttgcaaaacccgggacgttttgttcaaacagtagcagaatcaagttttgatgcttggattaaattttatcgtcaagatgaaaattcgaataatgcaggcacgagctattataacaaaggtgcattagttgccttgtgtttagacttaggcttacgtttacgtggttctagccttgatgccttaatgcgtcgattgtatgaaaatacgcaaaacggtgttcaggttaatgagcgtacaatttttgatttatgcgaagagctaacaggtgatagttggttagagcaaatcaatcatttgattaatactactgaagagttaccactcgatcagttattccctgagtttggtttaagttatacgcttaaaaatgataagactttagcttatggtttaaagctagctgataagcctgaaggtgtgttagtacaaaatgctcaccgtgagggagctggtgctaaagcgggtatttctgctaatgatgtcattattgcaattgatggactaaaagcgaccacaaaacttattgagaaatatgctaaacaaaagggtaattactcagtcttggctttccgccgtgatgagttattgtcgtttgaagttacaagtgacagcataaacttaactgaagttgaacttattattgaagatcaaagcaaagctgacaaatggttaaaagcctaaataaccgttaattaatttataaaaaaccgatgtttcgtgcatcggtttttgttttttcctaacttcaaaacatagaaagagtctttatctttgagtttgttttgaatgaaaagtataataattgtcagaactctgaaagatatctcatgtaatttaagactgttctatacctaaaaagttggtaaaagcacatttattaccataagttaggtataagattattatcgatagatttaaattatgtattatttcgctgcgaaatgtcgttatcactggatatttcgttgactgaaagccaatgagagtcgatactctcagggttttatttaagcatatcggttcgtaggcactgggccaaaagctcggtcctcaaaactcaattcaacggaaggggctatatatggctggtgaaaagtcaaccatcatttacacactgactgacgaggcgccattattggcgacttattcgctactgccgatcattgagacctttactaagccagctggtatcgagattgttaaaagtgacatctctgtagctgcacgtgtgctcgcagaattcgctgactacctaagtgaagagcaaaaggtatccgacaaccttgctgagctaggtcgtcttacacaagatccagatactaacattatcaaactcccaaatattagtgcctctgttgcgcaattgacagcatgtattaaagaacttcaatctaaaggttatgcaattcctgactatccggaaaacccagcgactgaagaagaaaaaacaatcaaagctcgttatggcaaatgcctaggttcagcagtaaaccctgttcttcgtgaaggtaactctgaccgtcgtgctcctgctgccgttaaaaattacgctaagaaacaccctcactcaatgagcgagtggaaacaatggtcgcaaactcacgtttcacacatggaagaaggtgacttctaccacggtgaaaagtcaatgacacttgaccgtccacgcaatgtaaaaatggaacttatcacaaacagtggtaagagcattgttcttaagccaaaagttgcgcttcaagaaggcgaaatcattgactcaatgttcatgagcaaaaaagcgctttgcgacttctatgagaaacaacttgatgactgccgtgaagcaggaattttattctcattacacgtaaaagcgacaatgatgaaagtttcacacccgatcgttttcggtcactgtgtgaaaatctactataaagaagctttcgaaaaacacggtaagttgtttgacgaattaggtattaacgtaaataacggtatggctgggttatacgagaaaatcgaaactcttccaacctcattacgtgaagaaatcattgaagatttacatgcttgccaagaacaccgtcctgcacttgcgatggttgactcagcaaaaggtatcactaacttccattcacctaacgacatcatcgtagatgcttctatgcctgcaatgatccgtgctggtggtaaaatgtggggtgctgatggtaagcaatacgatgctaaggcagtaatgccagaatcaacatttgcccgtatttaccaagaaatgatcaatttctgtaaatggcatggtaactttgatccaaaaacaatgggtacagtaccaaacgttggtttgatggctcaaaaagctgaagaatacggttctcacgacaagacttttgaaattcctgaagcaggtattgcaaacattactgatcttgacactggtgaagtgttattgactcaaaatgttgaagaaggcgatatctggcgtatgtgtcaggtgaaagacgctccgattcgtgactgggtaaaacttgcagtaactcgtgcacgtaactcaggcatgcctgcgatcttctggcttgacccatatcgtccacacgaaaatgaattgatcaagaaagtacagaagtacttaaaagatcacgatacgactggtcttgatatccagatcatgtctcaagtacgtgcaatgcgttacacacttgagcgtgtagttcgtggcctcgatacaatttctgtaaccggtaacatcttacgcgactacttaactgacttgttcccaattatggaacttggtacttctgcgaaaatgttgtctatcgttccgcttatggcgggtggtggcatgtacgaaactggtgcgggtggttcagcacctaaacacgtacaacaacttgttgaagaaaaccacttacgttgggattcgcttggtgagttccttgcgcttgcagtttctctagaagaaatgggtattaaagaaaataatgctcgtgcgaagttacttgcgaagacacttgatgaagcgactggtaaattgcttgacaatgacaagtctccatcacgtcgtacaggcgaacttgacaaccgtggcagtcacttctacttgtcactttactgggcagaagcacttgctgcacagaacgaagatgctgagttgaaagctaaatttgctccacttgcaaaagcattagctgaaaacgaacagaagatcgttgctgagcttgctcaagtacaaggtaaaccagctgatatcggtggttactatgcagttgacccagcgaaagtaagcgctgtaatgcgtccaagtgctacatttaatgcagcgctttcaactgttcaggcttaattactaattcattagtacatagctaaaagccggtgcataagcaccggctttttatttttataaaataaaagtcattaaaaaaagcccactaacgtgagctttaaaacttaaatatttttatcggctattgcggctacgaccacgtggtgctttggtatttggacgcgttgtaccgttagtcttacgacgcggtttttcactttcatccatttgccaaatacgctttgtaccagatttttttgcagaaccatctttgttcttgcgaaccattggcttaccgccagtgccacctggttttttcacatatgaacgtgaacgataaggttgttcagccggaacatctttaaagtctgggtagagtagaggctcaatttctttggtttcgcccggttgtaatcccaattgaactaagtcaatcgtaccaatttttgtacgaatgagacgtaaagtcggaaaacctaccgcagaggtcatgcgacggacttggcggttacgaccttcacaaatagagatttcaatccaagatgttggaatgctggcacggtaacgtacaggaggatcgcggtcccataaccattcaggctcacttaccttaattgctttagctggtaaagtcataccatcattaagctctacacccttacgaagctgctcgagtgcttcttctgttacatcgccatcaacttgaactaaatacgttttgtattttttattcgcagggttggtaatgaactgattcaaaccaccatgatcagttaagaaaactaaaccctcagagtccatatcaagacggcctgctatgcgcaaagtcgggtcatctacaaagtcagagaccgtcatgtgtgcttcgtctttacgaaactgggagagaacgtcatatggtttgttgagaatgacgattttcataaaaaatgacttcttctttcaaataagcggtaaaaacattgagctatatttaagtgcgaaatttgcttatttcccacataaatctcaaaaagggttaaattcgattaagctattatgcgttaataaaagttgaaagtattgtttatcgataattatttttgtttggttagttaaatattataaaagggagaatctacataatgggttatcagaagatcgtggttcctgccgacggtgataaaattacagtaaaagcagacctgtcactgaatgtaccaaatcatccaattattcctttcattgagggtgacggtattggtgtagatattacaccggcaatgaaaaaagttgttgatgcggcaattttaaaagcctatggcggcaaacgctctattgaatggatggaagtgtattgcggtgaaaaggccaataaaatttacggtacttatatgccggaagaaacctttgaagcgctgcgtgaatttgtagtttcaattaaaggccctttaactacaccagtcggtggtggcattcgttcacttaatgttgcactacgccaagaactggatttgtatgtatgtgtgcgtcctgtgcgttggttccaaggcgtcccttcacctgttcaacatcctgagttaactgacatggtgattttccgtgaaaactcggaagatatttatgcaggtattgaatggaaagcagattctgaagaagctaaaaaagttattaaattccttcaagaagaaatgggggtcacaaaaattcgtttccctgaaggatgtggtattggtattaaacccgtttccaaagaaggaacacagcgcttagttcgtaaggccattcagtttgcaatcgataatgacaaaccttcggtgactcttgttcataaaggcaacattatgaaatataccgaaggtgcctttaaagaatgggggtatgagttagcgctagatcgtttcggtggtgaattaatcgatggtggcccatgggttaaaattaagaatcctaaaaatggtaaagacatcattattaaagacgtgattgcagatgctttcttgcaacaaatcttgatgcgtcctgctgactactctgtaattgcaacccttaatttaaatggtgactatatttcagatgctttagcagcagaagtagggggaatcgggattgcgccaggtgcgaatattggtggagctattgcagtgtatgaagcaacgcatggcactgcacctaaatatgctgggcaagataaagtcaacccgggttcaattattctctctgctgaaatgatgctccgtgatatggggtggacagaagcagcggacctgattattaaaggtatttcaggagcgattgcagctaaaaccgtaacttacgattttgagcgtttaatgccgggagcgaccttgttacgttgctcagaatttggcgatgccataattcagcacatggaagattaaactttcatagaaaagccctcaattgagggcttttaaagtctttagatttataatattgaaaaataataaaaaataagaatttaaaacgttaaaattttagctaggaattagccgtatatgcccacaatatacatgctaatatcgttaaactcagtaatattaagccttgcccatgatgtgttgcatacagtggtacatttccaatggtatgcgtcattttgtagtttagaataggccgaatacaaaagaaaaaaagcggtaatgataaaatcactgtattactaattttaattgtatggcgaaaatagtaactaaatagtcctattagggcggcatacaataatgttttaaatagcacctctccactggtgtatatatctataccgagataaaaattaaacttccatatcagaagactaactgtagcaattattgcgataatacctacaacaacggcatttgctgggtttgatacattgaacatttttagagtttttaattgatataaattaatttgcttaaaatatatattataaaaacatagagtacagtgacgatttttaactttataaaactccctaaaaatcctcatttagacattttgagactcaagcgagtttgagcttgtttctttaaatacccatagggcaaaacaaaatatgatcacgatgagtagccctaaactttgaccatgacccgagagataaaacggaacatctgggatagtttgaatggctttgtagtcaagaattggctctagccaaaagtatgcaaatggaacagcaattaaaaattgtgttgtaaactcaatatgattgcgtgttaaaaagcccaaaatagctgctgtgagaatatagataacaatccttaccgagacttcgtatgatgttgtcatatctagtgcaaagatggtctgacacttaaatgccagtaataaaacaccgataaaagcgaacatcgccaagagctttaaaagctcatcaatataattgttattgctcatgttttgctcaattttaagtattaaaaattataaattttgactgaatatagatcagaaaatagctctctacattgacataatatgacattttttgtcagttaagtattttaataaggctactaaaatagttgttatgcggtttgttctactgatctattcattaatttttattttgacaatatacgactactcaatggaaaagcccctgatatatcggggcattttttattgcataaattccggatgcttctggggcttagagataccaattttcttttgatagctttggtctaaagcctgaataatgagtacgaaaataatcaaaaagagaggaaagaataaagttttcacgatttggtttctccgagagtgttcggcggggaagaacggataggaattaaaaggctcaatgcaaataacaaaacaatgccgcccattaaaaacagatgggcataagaccaatgcaagtgatgtaaagtactaataacaacgccacctaataactgagtgctggcaaacccaatggtggcaaggctccagattttttgataacgctgttcataaatctgtagcaggctgtaagagctaataaatacggtggcaggtgtgagtaaacctgtaagaaaggacgataaagtgagcaaagcagtagcatgtgaaaaaaatggtagggcaactgccaagcaatagacaccgtatagacatttaattgcctgcaaatatccaataaggcggcttaaacaatacgccacaaaggcgccaacacaacttccgaccccataaagaacccaaaataagtttcgttgttgcaatggaaaatgtagggtccccgataaatagtccatccaaaacaaagagtgagggatatatgcaaaagcactgcacatataagcaataataatgaccagtcctaaacgtgaatgtatgaagttttgaggagcgtgattggccgtttgaacggactcggtaggtgggtgccttaataactgtaaaagtaccaaactgccaataatggaaatgacggcaaaaatttcccagacatattgaacaggcatatttttaagtgcaggaataatgagagtggcagataacacgcctgcgccaataccactaaaccctaaaaaattgactttgagcctttggctaattgcaatatttttcatggcaaagctgggcgctaaaatcatgagtaggccacctgcgatacctgaaatggtgcgccagagaataaaccaagccagagacatgtgtataaacgaacagcagagtaggcttaagctgcctaaaaccgccgaagtcataatcaaagcaggtatagatttttctttaatgctaaacagggccaatagtgcgccaaccagatagcccaataaatttgcacttcctaagtagcttgcaaagtcgtgagtccatccatattgcacaatcataataggcatgagtgcggtataggaaaatctaaaaataccaattcctaggcaagtcgctaaaaagacaagcaggctcattcgatagaacgtagacatgagaaatctctcaatttttttattattaaaagcgagtttatttatcattagaaataatttaatatgatattaattatcttgttttgagatagtggcatgttgcttaagtctttagagttttttttagcggttgcagagagtggaagtttttcattggctgcacaaaaaatgtgtacggttcaatccaatatcacgagccacgtgaaaaagcttgaagaagagttaggtgtgattttattaaatcgtcataaccccgttacattaaccaatgcaggacaccagctacatagttatgctgtgcaaatgatcgcactgcataataaagcgaagacaatcttccgagaaggtgatattgacccgaatgaaactattcgtttgggcagtatggaaacgacagcagcaatacgacttcctcaattgcttaatgaatgtatgcagcaacatccgaatctgccgcttgaacttcaaactcacccgacaggatatttgttaaatgctgtgcaacaaggagaagtcgattgtgcttttgtcgcttctaaatatgtgattccagagctatatagttttccggtgtggcaagaacaactggttttggtttgcccaaaacaacaaattgattttcccgacattgccaccctcgcaaagactcgttttattgcatttcgacaaggatgttcctatcggcatgcaattgagttgtttttaaatgatcacagtgtgccaccttcgcaaattatggaaatgggcagtctggatggcattgtaagctgtgtggaattaggtgtcggttttgctttattgccaaagtcatatctgaataaagtagccgataaagtctcattaagttgttttgaaattaacactgaatctgcacatttcactacttatttggtcgctcagcctcctgaaacatggggcagtaatctaaagcaatttatttgttttattgagcaacaatttatacagaaatgcgcttaatttttatacataaatatctaacgtaacttatgttttaaaagtgatatatatgtatttaaaagtcattttatattctcattcagatcggtaatgatctgcatgctagaaaattgttgaaaagggtagtttatataggccggctatggtcaaatatgcccccttaaaagatgacacaagtaataatttggagtttgggaatgaatatacccttaatcatcaatattgtggtttttgtcgggttaatatttttactcgcccaaacacgtaaaacggactggagcttatctaaaaaagttctagctggcttaattttaggtgtagtgtttggtttaggactacatttgatttatggcggtggccatccgattcttgctgaatctattagctggtttaatattgttggtaacggctatgtaaaacttttacaaatggtcgtgatgcctttggtctttgtttcgattttaggtgcagtagcgaagctacaccaagcctcttctttaggaaaaatcagcttctacaccatcgggactttgttatttaccacactcatcgctgcgctggttggggtatttgtgacgaacttgtttggtttaactgccaaaggtttggtacaaggggcggctgaaacagctcgacttactgcaattcagactgactatgtgggtaaagtaacagacttaagtgtaccgcaatttattctttcttttatcccgagtaacccttttgctgagttaacgggtgcaaatccgacttcaattattagcgtggttatctttgctgtctttttagggatagcagcactcaacctaatgaaagatgacgcagaaaaaggtcaacgtattctgacggctattcagacattacagtcttgggtaatgaagcttgttcgtttagtgatgacgcttacaccatatggtgtttttgccctcatgacgaaagttgtggcaagttcaaatgtcgcagatatcttgaacctaggcggtttcttggtggcgtcttatttaggtttggcgattatgttcgtcgtgcatgctattattttgactctgaccggtgtttctccacttaagttcttcaagaaagttgctccagttctaacattcgcgtttacgagtcgttcaagtgctgcaagtattccacttagcattgaggcgcaaactcgtcgtttgggcgtgcctgagtctattgcaagtttctctgcttcttttggtgccactattggacaaaatggttgtgcgggtttatatccagccatgctcgcagtcatggttgcgccaactatgggtattaacaccctagacccaatgtggattgcttcgttagtgggtattgtgactttaagttcaattggcgtagccggcgttggtggtggtgcaactttcgcagcattgatcgtacttcctgctatgggcttacctgtaacattggttgctcttcttatttcaattgaaccactcattgatatgggacgtactgcgttaaacgtaaatggttcgatgactgctggtgtagttacaagccaatttatggggcagaccgacaaagctataatgaatagcgaagatgaaattgaattaactcaacatcattaagagttaatattaaacggctctccactctggatgagccgtttttttatatgtgtaacttgcaactgtgatgttaatttttaaaaaactgtatctatttttcttttaaataattttcgaaaatgagcctattaagaaagagagcactaacatgaaaatgtatcaagtcgatgcttttaccaaagagctatttcgtggaaatccggctgctgtgattattggaaaagagtggccaaatgcagatttaatgcaaaagatagcacttgaaaataacttatctgagactgcttttgtaaaaattatagactctgaaaattatgaaatacgctggtttactccaacggttgaggtggatttttgtgggcatgcgactcttgcgagtgctttcgtattatttaaagattttactgagaaaaagactcttaattttcatgtacgaaacttaggtttgtttgtagttcatcaagatgaagacggcaaaatcagaatggattttccaattcgtaaagctcagcaagttgaagattatccggctattttacgtcaagcattaacaaaaccttttaaagcggtttatcaaaatgttcaagcctacattgttgaatatgagtcagtgcaagatgtgttagatgagcaacctgacatgaacttacttaaagccttaggtaagcggactgcaattacaactacagcaatggattttgcaatcacctcaaaagctgacgatcaatatgactgtgtttctcgttattttgcacctgtcgcaggcattgatgaagacccggttactggttcaattcataccgcaatagcgccactatgggcagagaaactcgctaaaaataatattgtggcctatcaggcttctagccgtggaggcgtattgtattgtaatgtcttaaatcaggaacgtattgaaatttcgggatatggcaaactttatatgcaagccgaaatttttccttaaaatataaggccgtttaaataaacggcttttttttcaaatctttactatgaaagtcagctcaaatttcctactatagtcacacaactattgattttttattattcaaattaattggtatttatatgtttatgcagtttaaacaactgactctctccctatgtatttttggtttaagtgctgcctcttttgcacaaacaacattagtaaaaagtaagcaaaatgttgaggaatataaattagataatggttttcgggtagtgcttgcgccgaatgacaaagaaaataaaatctttattaataccatttatttaacgggttctttaaatgatccacagggtaaaagtggtttagcacatttactcgaacatttagcatttaaaggcacgcaaaatgtaaaaggtgaagaattccaacgccgtttagatcaatatacgttaatgacgaatgcgagcacggattactattcaaccaaatacaccaatattgtccgtccagaaaaaacagcactcgatcaagtgctgtaccttgaatctgagcgcatggacaaattagttctacaagaaaaatttgtgccttctgaaattgaaatcgtaaagcgtgaacgtgaagtccgtatggatcagccttttgctgtcttgatggatcaaatgtggaagtcggcttatggtaatcaatatctaggtcgattaccgattggtgatttacctgagcttaagtcaattaaaatgcctgagttgaaccagttctatcgcagttggtatgcgcctaataatgcggtcatggtgatttcaggcaagtttgataaaactgatgttttgaaaacgatagaccaatattttagcccaattcctgcgcgagctgtgcctaagcctgttcaagtgcctgtgttagattctacaaaactcaaaaaccgtgagtttgtggtgaaaaagggtagtgatttggccaaattccatatctatatggatggtaaaaacacaaaaattcaaccggaactggctttcgcacctatgttgtataccatgcagccaagtggtcatttgtaccaaaatatggttgaaacaggtgttagtacagacgttcaggcatcaacatggctagatcaagattttaacgtcgtatttttaggtgctatttattcaccaaaaaatgaccctaaaaaagttgaaagcgctttgctctctggaattgaaaagggtaaaccttttacagagactgagctaaatcgtgtaaaaagcttaatgaaaacgcaaggtgagttagtcaataaagatgccgttgctttgggttcccgtttaagtgattacactgtagcggatgggcaatgggaccaatatttcaaagatttagattcaattgataaagtgaagctcaacgaggtaaatcaaaccttaaaacagttccttgttgcaggtcatcgtattgatggcgatattttgccaacaccagaagaccaaaagaaagcattacaactcgacgcaaaagataagcctaaaacattagatcaaacagatgttaaagcagagcctttaaaagatccgaaagtttatcaacaagaagttgccgagtttttaaaaacgtctaagcaatatgccgaaagtaatgagaaaaagatccttcgcggaaaacttaaaaatggaatgaagtatgctttattccctgtagaaacccgtgatgatcgtacctatgccaccattactatggattttggtactgaaaaatctttattcgataaaggtacggttgttgatttaacttcatatttattgcttcgcggttctgataaatatagcttgcaagatattgccgataaatcgattgatgcaggtggcgcagcttatgcaagtgccgatggcaatggtatgaccattaatattcaatctaaaactgaaaagttcgatgagtttttcaagtttgttctagaggtcatgaaaaatcctaaatttgaacaatctcaatttgacttaattaaatctcaaagcttatctagtcttgatcgtccttataccgaaccggatgtggtagcaggtctaacattatctcgcttggtagaagaataccagccgggtgatttgcgttatcactttgaaccggagctggctaaaaaacaattaaagaatgtgactcaagagcaagtcaaagagctttatcagcatttctttgccatgaatcatgcgcaaattgcgattacaggtgcatttgatacccaaaaaatgaaaaagctattgaatcaagagttcggaagctggaatagcaaacaaccgtatgaaaaaatcttgattcaacatgttgattttcctgcccagcaagtacatgtcttatctgagcagcgtgagtttggtagttatcaaagtgtacttgcattaccggttgggaaaaatcatcccgacgcttctgcattaattttaatgaattacattttgggtgaatctcaaatttcatcacgtttggctcaagagcttcgtgaaaaaaatgcattggtatatggttttggtactggtttgcaattagatcgagacacgaatgtaggtgcgttaagcattagtgcaaattatacggctggtcgctcagcacaagtttctgcttcagttcataaggttctaaatgacttaattactcatggtattacagagcaggagcttgcagcagcgaaggcggatattatgaagaaacgtgttactgccttagaagatgaacgtaatatccacggtatgttaaatctagagcttgagtcaggtaaaacattacttgaccgtgttaaacatgaccaagagttaacaaagttaacggttgctgatgtgaacgcagttattaaaaaatatattaaaccttcaaatcttgttgaagttatggctgaccagtatggtcaagcacaaaagcagtaaataattgccaaataaaaagccacttcatgtggctttttatttgagtggtaaaatattttaatggtcgtgtttgtgagtatgaaaatcttcattcttacggaaacgtaagtagttatcgaactgttcacaatactcatcaaagttatcttcaagcatcatttggaactgttgaagaagataagacatcacctgatcttttgcatcacgcatttcattaccatctttaaaattattggcagccacccatgtattaaaacgagcagttgcaaataacatggctgcgctcacttgaccacgaagctcggccgggtctggcttttggccttttggcgggcgacaaaaatcatttgcttgtttaatgaattcatccgcacgctcaaagaaaacagcatttaacgcttcttcttcagtaatatctgttgcattaatcttttgagacatgacttattcccgcaaaaatagagctgcttattataggcaaagccttgcggaaacaaaacctttgccttagtctgtaaatagcctaagtattgggagttataatatgcaagatgcaatagccgttcaaagtctaaaaacagacattgctttattacgccagcatatttttccaccccaatatttggagcatgtagaagggctgccaatttattatggtttgcaagaagaagttgtggcctattatcagcaatggaaagatttaatagaaagggcacaagagctttttcaaccttttatggaagatgaattaccagatgcaattcatttaccaagccatctaaacttacccttattctttttccatgtagaccgaattcggattaataaaacacgcgcaaaagaatcaaaaactttccgtggtgtggccagtcttattgaaaaatgtgggcagtttgaaacagatcagatatttaccatgcaagaatggttgcaaagtgatgatacagcagcgctagttgcacaccgtgaatttattgatttacggacgtatgtattccagcatggtcaaagtgaatatacgcgttcacggttttataccaatggtattgtgttaggggtagagctacactttaaactcgtcgatgctcgcgataaaccaagaaaacagcgtagtgatagctatagcgatccattagcagataacggtgtatggaaagtatttggtaaatatagataaaaagtcgcggcatatttgccgcgacttcaagattcttaccaaaatgtttttgcctgtttaaatttttgcaaagcttcggcagattgattttgtaaataaggttgtttggctttaacccatcctaatgcaaaccaaaaatgtgggtcgtgttcaaccgctttattaaatagatcttcggcaataaataagtcgttataaagtcctaaagtattttgcacaggctgtaattgttttaaaaactgctgaacatttttacgaggatataagctcgatataaactcaatgcagtaacgaagctgtttggctttcttgcgcgttctgtgctgttcggtgacttcaagttcagtgaaatgatcggcattactcaccacttgatggtgtaacttatctaagctttttcctatatattttttcaattttcctttggcgttttgatcgtcttcttctgaataggcaaatgctaataaggcgagtataagcttaatggtatctgcggatttaaacagtgtggcaagatcttttaatggctgttcagagatcggaagtaaaagctcaggtgaaccatgctgcacaatcataggtaaaatttcggtacgaatagcatcttcgtctcgcgtgtccccaagctgacggaatagttcggcaatttgctcttcccacacagggtttaactcgtctgaccatgctgaaaaatgttttagtgcactacgtaaacggcgtaagcttacgcgtgcctgatgaatgtgctcagcctcggcaactccatcggcaattgcggccatgttaggcaagaattgtcccaaacagttttctacaatctttttgagtgcctgttctgctgaaatgtttttatctaagttcagtttttttgcgtgaacagccggtgaagcagcttgccccaatgcgagtaaattaccgcgctcggctttacttctaacatcgagccaaagttcataacgattaatccattgctgagcaaattgaatcagtgttttgactgcaccttgtttaagttcgaactcaacttcgcaaattttgctttgtgctgttgctgtttttacggcgccgtcatcaagacagacttcaattgccgtgtcatctgcttcaaaaacatgataggtacgttgtacatcagtctcaaactgtaagcttagcttttcgacttcagagcctaaagcttgagtaatcaaatctgtgacggctttattgtctttatataactcaaggtttaagtcaggttcttgatcgcattttcctaaaaaaacttcttcttcgacacgatgtaaatgactttggccggcagccttaaaggtttgtacccacagatcattttctttacgtaagcgtaaggccataccattttttgcaagtaggcggtctggcgtatcgtaatacttggcctgtaaatgaatatactgtgctttatgtttttttaaatattgctggacggtttttttcttcgattcaggtaactgaaacttaagctcaacttcaaccataacagatctccctgaatcaggtatttaaactatcttgaataagtataatagcttagcgctaaaaataatgtttttgatagagaaagttacaatcaaacatatgacgctacacttttatttaggtgtacaatcaggtgatgttttgatcaaataaaaatcaggaagatgatcgtgaatgcacccgtaaattttaatcatgaaactcagccagagtttgaattacctattaaaaactatcaggaattttatcgtttttatttaactgaacaccgtaatattatgagtaggcgcttacatgcggtgggcagtagcattggtctatactttttttcaaaagctattcgtaagaaacaggccaaatacgcactctatggtttagtttctggctatgcatgtgcatgggttggacattttatgtttgagaaaaataaacctgccagttttaaacagccactttatagctttatttctgattggcgaatgctctctgatgttgcgactggtcgattaagtttaattgatcgcaagcacgataaaattccaagttaatttttatttctatttttaatataccgattggtactgataagcctatatcaatcggtacttatgatgacttataaatccgttatactagcgaagtttttaaaaagcgagagtagagtatgcgcggtttatacctcattaccaatgatgacccaatccaattattattagaaaaattagacgccgcactcgcaacccgtcaaatcgcaattttacagtaccgccgtaaaaaaatagacaaagccgaacagcctgctgaagttgaacagatcaaacaattatgtgaaaaatatcaggttccttttgtcattaatgatgacctaaaactggctgctcagtttggtttaggtgtgcatttaggccaaagtgacggtgaaattaccgatgcaaaatcgcagttaccagaaggtgtcattattggccgtacttgcttaaactctttagagcttgctcaaaaagcaattgccgatggcgcaacttatgttgcctttggtgcggtttatgcaactgccactaaaccggaagctggcaatgtaggtatagaagtgattaagcaagcagcagctcaatatgatttacctatttgtgcaattggtggtttgactgttgaaaattcaaaacccgtgattgaggctggagctgacctctgtgcagtcattagtgatatattaggtcgatcaactgctgaaattcctgcccgtgtacaagcgtgggcacaattattttcttaagctttcaaaattattttttagatatttaagacgagcatttccatgagtttatctccaaagcaagaacagttatttaaacaagccagcaaacacattccaggtggtgtgaactctccagtacgtgcctttaatggcgttggaggcacaccggttttcattgagaaagccaaaggtgcgtatttgtgggatgtagatggtaagcgctatgtagattatgttggctcttggggaccaatgattttgggccatgctcatccggatattattaaggctgtgcaaacagcagcagaagatggcttaagttttggtgcaccaaccgtacatgaaacaacattggcagatatcatttgtgaaatcatgccatctattgaattggtacgtatgaccaactctggtacagaagcgactatgactgctattcgtttagcacgtggttatactggccgtgacaagatcgtgaagtttgaaggttgttaccacggacactctgactcattgttagtaaaagcaggttctggtttattaactaaaggtgagggcgaaccaacatcaaaaggtgtaccagctgatttcgctaaacacactttaacactgccatataacgatgttgcagcattaaaagaatgctttgctaaatttggtcatgaaattgcaggcgtcattattgaacctgtcgcaggtaatatgaatatggtgaaaccaattgatggtttcttacaagcgattcgtgatgtgtgtgatgaatacaaatctgtatttattattgacgaagtaatgacaggtttccgtgttgcattaggcggtgctcagtcagtttataacgttaaacctgacttaacgactttaggtaaaattattggtgctggtttacctgtaggtgcctttggcggtaagcgtgaaatcatggagtgcatcgcacctttagggggtgtataccaagcggggactttatctggtaatccacttgctatgcgcgctggtatcgaaatgtttaaacatttacgtcaaccggacttttacagcaagttatctgctcaacttgaaaagttacttgcaggtttacaagcagcagcagatgaagcgggtattccatttaaaactcagcaagctggcgcaatgtttgggctttactttactgaccaagaagacatcacaagctttgactctatgttggcatgtgatattgaagctttcaaaaagttcttccatggcatgttaaaacgtggcgtaaacttggcaccgtcagcatttgaagcaggctttatttcatctgctcattctgatgaagatatcgaatttaccattcaggctgcaaaagaaacctttgccgaaatgaagtaagcaaaaaggcccgttttaaacgggctttttaatttgagctattttatatttgtagagaacaatgttttatcccttacctcgaaaaatccagttagccgcaagtacttcaaattggcctattgaatctacgcaaagcatattgctcctagtcgggctagatgatcttgaaaatatatctgattgggcgcatcagccattagccgatcatttagaaatactaagtaaaagagcacaagcactcgaaattccggtcatgatgattcagtcatctcaacttcaacaggccatgttacagcttgggcagcacttgtcatcaaacactcaggcacaggtaattatggcggggaatttatcaccgctatttaagcaaatcatgcagcttgttttatccattaccgattatgtagctattgtaaatgatgcaatattggcgagtagtttagagcagcatatacaatggattgaaaaaataagttttgaccatattcaacatataaacacgcagactttaatgcgcttatggtctttaagtgcaccgtcattacaggtcttgtccgataaaggaattttattggcagttgctgaacagatagggcgacatccaatggaaattcatcccgaaatagatttaagaaactatggtctagacgcttcgggagtcaattatttggtggaattatggcgtgctaatggtgcgagcctaactgttgatgagttgatgcaaactcctacattgcaacatattatgcagttattgaagctctaatcggctttagccgtaatgtgattcataatatttgcaaattctgtcgttaatttacccgaacggcattgtaattcggacgtaagctttttattattgcccgcttgtttttcatcttgccttgggaatacaactttgagtgattttctaagtgaacatctgatctatcgtgatgatgattttatggtgattcataaaccttcggacatcttgagtgtgccagggaaaggtgatttacatgacagcgttttgacaagactggtggcaattgaaccacgaactttgctcattcaccgccttgaccgtgatacttcgggtattttggtttttgggttatctaagcgtggacagagtgcgattgcacgccaatttcaagaccgtcaaacttcgaaaatatatgaagcgctagttgctggtcatttagagggtgaagggacagtggatatccctgtcgtctatgatccgagtcgaccacctttacatattgtcgatgcttctcataacaaacctgctttaacacattggcaggcgattgaacatttccagattcagggacaaccggttacgcgtgtcaaattaacaccgattaccggacgttctcatcaactccgtgtacacatgcaatatctgggacatccgattgtaggtgatacattgtatgcagcaccggaacaattacttgttcctcgtctgtgcttgcatgctaaacagttaagctttaatcatcctgtcacaggggaatcattaacttttaactgtcctgtaccgttttaatgtaaaaactttcaatgagtaatttttgtagcgaaacaatttaattggtttctgctgcaaaattttgctttaaagactacataaaaagatgcaaaaataagctactttgcatcgtacaatatgtagtgcgaacttgagaaaaaggtggaaaaattgcagcagtatgctattggtcaacgttggctatcagatacagagactgagctcggtttaggcgttcttattgatgtagatgaaagatctgtcagcattttattccccaagagcgatgaaacgcgtgtttatgcacgcaataatgcaccgctttctcgtatcatctttaatgtaaatgatgaagttcaagaccaagaaggcaataagtggaatgtcgagtctattgaagaccgtcatggtgttttgcgttataacgtggttcgtactttagaaaatggcgagcaagaacgtaaagcgctaaacgaaacgcgtattggtgcacaaattcaattatcaaaacctttagatcgtttgctggcaagccagattgattataaagagtggtatgacctacgcattgaagcaatgctgatgcaggcgcaaatgcaaaccagcccattacgcggcttggttggggctcgtgtaggtttaattccgcatcagctttatattgcacatgaagtcggtaaacgtttcgcaccacgtgttttacttgctgatgaagtaggtttaggtaaaacaattgaagctggtttaattatccaccaacagcttaaaaccggccgttctgaacgtatcctgattttagtccctgattctcttcagtatcagtggatgattgaaatgcgacgccgtttcaatttgcaattttctctgtttgatttaacccgtactgcatctatcaaagaacatgatccagaacttaacccgttcttaactgagcaatgcattattgccagcgtcgacttgatggtggaccatgacgatttgcgtgagcaagcattagaagctggtttcgatttactcgtcgtcgatgaagcacatcacttgatgtggagcgaagaagagggtggtaacgatcgttacgacttggttgaagagcttgctgaaaatacggcaggtgtattgttgcttactgcaacgcctgaacagctgggtgtagaaagccactttgcgcgcttacgtttgttagatccacagcgctttagtagtttagagcgtttcttggatgaagaagctcaatatcagcaaactgcgcaaattgcagaagtgcttatgtcggatgagcctttaactcaagagcatttatctgctttagaaggtttgttaggtcattcaattgaagaccaacctgagcaacgtttcagagcgattcatgagttgttagaccgtcacggtacaggtcgtattttattccgtaatacgcgtgaagcgattcaaggcttccccggccgtgattgccaacctgcgcctttacctgcgccagcagattggtcaaaagacggtaaattacgcgagcaaatgtggccagaagaagcacaaattgatggctcatggatgcaaaatgatccgcgtgtaccgtggttaatggaaattctacgtaaagaacttaagcataaaaaagttcttttaattgcccgtagtggtcctgttgtcgagtctttagaaagtgcgcttcgtttgcatgcaggtattcgtacagctatgttccatgaaggtatgagtttgcttgagcgtgaccaagcggctgcttactttgcagaagaaagctacggtgctcaaatcttactttgttcagaaattggttcagaaggccgtaacttccagtttgcgagtgatttaattttatttgatttgcctgcaaaccctgacgttttagaacaacgtattggtcgtttagaccgtattggtcaagaaaaccgtatccagattcatgtaccttacttaatgggcaccgctcaagagcgtatgttccgttggtataatgaagcattgaatattttcagcaatatttctccaacagctcaaacgctacaagaaaactttattgttgaattaaaagattgcttgcttgccgaccaaggtcaaacatttgaagatttacttgaagaagttaatgttcaacgccaagctttagaagcagagttacaagctggtcgagatcgtctgcttgagtacaactcatgccgtcctatcgttgcacaagaaattgttcaagcgttagaagactatgatgacaacacaacgctgcctatgtttgtgaagcgtttcatgtcttcaactaatattgactttgatgagcaaagtaacggtacagtcattattcgtccaactgaccagatgcaagtgcaaggtttggcattagacgaagaaggtatgactgcgactttctatcgtgatcaagcgcaaatgcgtgaagacgctcagtatctaactttagaacatccgtttattgaaagtgtcatggaaatgatccgcacacaatcatttggtagtaccaatgttgctgtgcttaagtccaatgcattaaagcaaggttcggttttacttgaagtctggtttaaagttgatgtggtggcaccaaaatccttgaacttgccatcaagcttaccaaaacaacttattcgcgtattgttaagtgaaaatggtcaggacttatctgaaaagattgatccaaccattttaaaaccgtatttgcatcatttagatggcaatagctgccgccaagtggttaaagcccgccgtgaagtgattgaagagcgttataaacaagcgcttgatattgctaaagaaggtttacctcagcttcaacagcaagcaaaagagcattatggtaataaatggcaatatgagattgatcgtttaacttacttaaaacagttcaacccgagcattcgccaagacgaaattgagcgcttacagaagttgcaaaaagaaggtttaagcttgcttgatggcttaaccgtaacccctgaagcgattcaagtgcttgtagtagtcaaaccataagcaatgagtaataaaaaaagcgccacacaggcgcttttttattgagtaaatttaagttaaatcaatctggcatcttttaattctagttttaaataagcatagaaaatcggtgctgcaattaagccacttaagccaaagattgactcgaaaattaacatagccaataaaatttcccatgcattggcattaattttatgaccaataattttggcattaataaagtattctaacttgtgaactaatacgaggtagagtagcgcaacacctgctagaccgagtgaaattgtaagagccgcaataaaagttaaagtatttgaaattaaattccctaaaattggaattaagccaaacataaaggtaagaatggttaaggttttggcgaaaggtaggtgaacaccccagatcggcaatagtacaaaagcaaataatataaagagcagcgtattaatcgctgaaattttaatttgtgcaaaaactacatttctaaaagaaattgataatttttgaatacgttgaatcagtaacgatttgaaaacaggttggggtgtacgtcggtgaaagccgtgaatagcaaccaatataccgataataagacccatcaccatagtcactagattatgcaaaatatcggaactggcattttttaatgtagttacgttatctttcataaacgcgaatatttcatctttcagttctgtaacgctatctggaatatagcccggtaaatatttcccaatctccgcttgtaagtgcagtagtgtttggtcgactttaccgttaatactatgtaaaccgactccttttaaatcatatactacaaagctaattaaacttgtaatgaaaaaggcaagaagagaaatagtaataatacttaataaaatactaataaaaatgcgggctctttgaccatcaatataacgttcaacaatagagcttaaactaataataatttcataaatgagaaagcctgcaaaaaaacttgctaagagatgcagggggataaccgaaagcaaaaaaatgcccatcagaatatagcttgcaatcaggctttgacgattactcaaactttgcatgtgaatccctgaataacgtggggaagtattgatatgtattgctagaattatttacttatactcttgcatctaagctgcttcaatccatggtttatatttttattaatcagtaggcacaggtgtataaaaaatggcttgtaaaatcacaaaccattttatgtggaatctatcttatttttgcttcgtctagatgacgggcaccttctaaaatcatccggatcatgatcattgtttgttctgcgacttcagcacgctgatcaataggaaggtcaatcactttggcacccatgtgaaaaacaagttgtgtaattgcttttgcaacaagttcagggtggtatagatgattgttattgaggcgttctaagcgaattaaatcttcttgtagctcttgctgaaagaagttgagctgtcgatctacagcagctttataagaagcggaacctgtaaaaccttctcgcaacaataaacttaaattaccttcatcagcatccagctgttgcagaaaaatttctacagaactacgaataatgctgtcttgcaaagatgcacgaaggcgagcttgacgaataattttacgtaaaacgataccggcacggtcaatgagtgaaatagctaactcatcaatatctttaaagtgacgataaaaactgtttggggcaataccagcttctcttgcaacttctcgtaagctgagtgaggcaatacttttttgtggaccaatcaggttaagagctgcctgaaaaagttcttctttcgtaatcgtcgcttttcttccaacagaacgcgttactgtttttatttcaatgacatcttgtgatgaggttgtgtcatttgggctctgagaaagtgaggtttgggtcatgtttttcaatatattcttaaactgtctggattatagcgttagacagggaacttgtgaaattgtaattaaaagtacgagtgtatatacaaatatatatacatgtgtataataattaaaaaagagcgacagagccctcagttatgcaagcaatcgaaaagagaaattctctattcaattcattaacacaagctgtatttgacaaaaatatggcgaacttctggctacaaaaaataaatcctttatggtctgtgcagcatggactagttcaaattgtaaaaaaagaattcgtagctcatgacactgtgagcctgacattaaaatgcaaccgcttagtgaaaatgggcgcggcaggtcaacatcatccagtgattgttgaaattgcgggccgtcgctatgaacgtacttatagcttgacgcaaattgatgcagagcacttacgtttaacagttaaaaaagttgctgatggtattgtcagtaactggtttattgcagaaagcaaaattggtgatgtttttgagcttgggcagccttatggcgacatgcaacaaaacattcagacaccgaaattaattatgttagctgctggtagtggtattacaccaatgttgagcttaatcacagcaattaagcaaagccaacagttagaaaaaacgcaggttcagcttttatattgggtcaaacagcgttctgatgctgcttttacagagtactttgaacaagtggctgaacaaaacccaaactttagctatcaggtgttttacacacaagaaacaccaaatgatgaacgtttaaatgccgaacatcttgcactggttgatggtattgaaaacagcacagtttatgcatgtggtccatcgggttttgtttcaactgttgaacagctttttgaaaaagcaccaactgtacttacagaagcatttagtttaactaatgaaagttctgcggatgacattggttatgtgaatgtcacattaacccagtctaataaagtgattgcaattcctaaaggccaatccattttggtcagccttgagcatgaaggccttaagccgacacatggctgtcgtatgggaatttgtaataaatgtgtttgtagtaaaacgcaaggttctacacgtaatttactaaacggtagccaaaatacggaaccaagccaattacttaaaatttgtgtgaactcagcacaatccgatctagttattgatctttaagagagaactcttatgaatatgccagtgaaagtcgaatattttaaaaatcctaaaaatcgagatttgactccagcagaacttgaagcatttgcaaaagagcttgatcagatcaaacaagaagtattggatgatttgggtgaaaaagacgctaaatatatccgccgtgtctatgctgctattcgttatagtagctttttaggccgagcttgtttatttgcaggttggttcccgccagcgtggattttaggtacaggtttattaggtttctctaaaattatggagaacatggagctcggccataatgttatgcacggtcaatatgactggatgaatgacccgaaatttaatggtcaaacttatgaatgggatactgtaggtacctctgacaactggcgtcaaacccacaactataaacatcatacttataccaatattaaaggtattgatgatgacattggttatggcttacttcgcttattccctgaacaacgttggaagccagggttcttattgcagcctatttacagtattccattttgcttattgttccagtggggcgtagcaattcagaatcttgaaattgggcgtgtactttacaagcgtaaaactaaggcacaatttttagaagagttaaaaccggttaataaaaagattggcaagcaactctttaaagattatgttttcttcccacttattgcagggccggcagcactaccagtatttacaggtaacttggtcgcaaatggccttcgtaatatctggacctttagtattattttctgtggtcatttcacgaaagatgcagaagtgtttccaaaatctgttttacaagaagaaagccgtggacactggtatatgcgccaaattcgtggttcttctaacttaacaggttcagaagcattccatattttgtctggtcacttaagtcatcaaattgaacatcacttattcccagatattcctgctcgtcgttatcgtcaaatggctccaaaagttgaggcggtttgtaagaaatatggcttgaactataacaatgcaagctttgttaagcagtttggacaagtggttgggcgtattgtgaaatatgcgttcccatttaaaaaataagataaaagagccctgagaattcagggctttttttatttctttttagaaatccacatggtaattgtggcatgaaatactttatctttgtgagtgtcgtaaatatctacgttgactaaatattctccagctttttcccagttataatcagcttccactggtgtagcaattgcaattaagtctgtttcagctttttttaaatattcaacagtcattccttttggaatccagcgatgggtagatgggacagtaacttctgtcattgttccacccgccagttcagccatattacacatcgcaatcgcatggactgttccaatgtggttaagcacagaacgcttcttcttaatagaaatttcgcaataattcggttttaactcaataaaaagaggggaaatactgccgaaataaggtgcttttaagcacagcatacgagagaaagtccacttgcctttaggaaaagcagttactttattccagagctctaatgtggttgccataatttgacttcctttaattttaaaaatacagaatattattctgtttaagaatatagttctgtttacaaatatgcgtcaagtcattcaaaatatctccgatgactggtcagagaatacaaaatggtatctgctcaaaatttattagaacgcttatatcctggaagaagagctgctttaaaacgacaaatattattagatgctttagattgttttttagagcagggcattgaaacgactagtattgaaatgattcgtgccaaatcagaaagtagcgttggggcgatttatcatcattttaaaaataaagagggtatagttgcggccttatttttttcagctttagatgatcaaacagctctgagagatgaatatttaaaacagtccaaaacattaaaagatgttgtagaagctctaatttatagttatgtggactgggtaagtgagcaaccggaatttgcaaaattcttaattactgcgcgttttaacattatagagggggaggaacagcaacaacttacacaaaaaaataagagtagaaaccaaaagatatttagcttgatttcaaactttgaagaatttaaagcatttagtttaattccacatgaacttttgctttcattagtgattggttctacagagagctattgtcgtgcgtggttatcacaacgtgtaaaagctgaccccaaagactatagagaaattctggcaaaagcagcttggaattcattacaggatttgcgtttagaacattaatagcgagcaataaaaaaaccgcatgaagaatgcggttttagattgaaaaatgaattatttaaactggattgaaccgtttgcatttacagtaattttagactcaccagcagccatatcttgagctggtgccgcttcagcagcagcgaacttagctaggctggcacgcattacaggttgaggaaaatagttattcgtgttcaggtttagagtgaccaaagaatattggcttttattccatgcttgagtcaacatttgcgcacgctgttgaaagtttttagacgcttctaccatcaattcattctcaacttttttacgttgctcatctgagacgctaaaattaatggattgagtttgaaagctttgttgtaactcattaattaattggctagcagctttaaaatctttactttctaaacgaatttccgcgcggccacgccattcttttaatttattactgtcattgtcataaattggataagtgctttgggcaccagtttccactttcacttgtgggtatttacgcgaagttgcgagtgcttggttcattaactggttaatttgatttgaaagctctgcaggctgcttattgcttttttcaatatataaagttgcatgcatttcatcgtttgaaacttggcgagaagcttctgcttgaacatttacaatattgtagtgaagggcattatcatcttgggcaaaaaccatagggctgagtaccgtaccaaggagaagagtagatattgctaaagtacgcataaatttatcctttaaaaattaatataaatttaatttttttcattaagaaatgttaaacataagttatgcataacttttgcagattttgtggggtatttgtaatatttaaatcaagttttttaatttttggtaagaataaaattctttaaaaataaaaaacttagaattaaagtgtttcaatgtaacttaaaaaatcacacgaatataaaaaaagaatattttctttaggttgtcacatagtatgatgataattcatcataactattgggataatacaatttttcaataagattagatgagtaaagtacacaaaagacgttttttttcttgcaaaattaggtatcatcgcgctcctagttacaagatataaaatatgtgtcttcgctagttctataaagcaccgagtcaaaggaccaaaagtcaccagacttatttctttctacccttatcagagatggtaatccgatatgagcgttacttctgtcaaccctgccactaatgctaccaacgaatattatttgactcgccaaagtcaaatggaatcgaatgttcgtagctatccacgtaaattaccgttagcgatagcgaaagcacaaggttgctgggttactgatgttgaaggtacacagtaccttgattgtttagctggggcaggtacattggctttaggtcataatcatcctgcggtgattcaaagtattcaagacacattggcaagtggtttgccattgcatactttagacttaaccacacctttaaaagatgcgtttactgaagcgttgttagcatatttaccaggtggtaaagaagaatattgcttacagttctgtggtccttctggtgcagatgcgactgaggcagcaattaaacttgctaaaacttacactggccgtagctcagtgatcagtttctctggtggttaccatggtatgactcatggttcacttgcaatgactggtaacttaagtgcaaaaaatgcagtgaatggcttaatgccaggcgtacaattcatgccatatccgcatgaatatcgctgcccacttggtttaggtggtgaagctggtgttgacgctttaacttactatttcgaaaactttattgaagatgttgaaagcggtgtaactaagccagctgctgttattcttgaagcaattcaaggtgaaggcggtgttgttacagctccagtaaaatggttgcaaaaaatccgtgaagtgactgaaaagcacaacatcgttttaattttagacgaagttcaagcaggctttgctcgttcaggaaaaatgtttgcatttgaacatgccggtattgaacctgatgtcgttgtaatgtctaaagcagtaggtggtggtttaccacttgcagtattaggtattaagcgtaaatttgatgcttggcagcctgctggtcacactggtactttccgtggtaaccaacttgctatgggtacaggtcttgttgtattagaaacgatcaaggaacaaaaccttgctcaaaatgcacaagagcgtggtgaattcttacaagctgaattgaaaaaattagctactgaattcccatgtatcggtaacgtacgtggccgcggtttaatgattggtgttgaaatcgttgacgagcgtaaacctgctgaccgtatcggttctcaccctgctgactctcagttagcggctgcgatccagactgcttgctttaacaacaagttattgcttgaaaaaggtggtcgtaacggtacagtaattcgtttactttgcccactcatcattactcaagaagagtgtgtagaagtaattgctcgctttaagaaagcagttgcagaagcattggttgcagtgcgaggcgcgtaagtatggtggattttgcagaacatcgtaaagcgttactctgcaatgatgcacaatccattgctgactatgagtcagcaatgggcgaagcggtaaaagccgtttcagcatggttgcaaaatgaaaaaatgtacacaggcggtagcattaaagagttgcgttcagcaatttctttccaaccttcaaaagaaggtatgggtgtacaacaatctcttcaacgtatgattgagcttttcttgaataaaagcttgaaagtacaccatccacactcattagcacatttacactgcccaaccatggtgatgagccagatcgcggaagtgttaatcaatgcaactaaccagtctatggactcatgggatcaaagcccggcaggttcattaatggaagttcagcttattgattggttgcgtcaaaaagtaggttatggttctggtcaggctggtgttttcacttctggcggtactcaatctaacttgatgggtgtgttacttgctcgtgactggtgcattgcgaaaaactggaaagacgaaaatggtaacccatggtctgtacagcgtgatggtattccagctgaagcaatgaaaaacgtcaaagtcatttgttctgaaaatgcgcatttctctgtgcaaaagaacatggcaatgatgggcatgggcttccagtcagttgtgactgttcctgtgaatgaaaatgcacagatggatgttgatgctcttgaaaaaacaatggcgcatcttcagtctgaaggtaaagttgttgcttgtgtcgttgcgacagcgggtacaactgatgctggtgcaattgatccattgaaaaaaatccgtgaaattactaataagtatggttcatggatgcatatcgatgctgcatggggcggtgcactgatcttgtcaaatgactatcgtgcaatgcttgatggtattgagttgtctgactcgattaccctcgacttccataagcattatttccaaagcattagctgtggcgcgttcttgttgaaagatgaagcgaactatcgtttcatgcactacgaagctgagtacttgaactctgcttatgatgaagagcatggcgtacctaaccttgtgtctaaatcattacaaacgactcgtcgttttgatgctttaaaattgtggatgaccattgaatcactcggcgaagagctatatggttcaatgattgaccatggtgtaaaactgactcgtgaagttgcagattacatcaaggcaactgatggtttagagcttttagttgaaccacaatttgcttcggtattgttccgtgttgttccggaaggttacccagttgagtttatcgatagcttgaaccaaaacgtagcagatgaattgtttgcacgtggtgaagcaaatatcggtgtaacaaaagttggtaatgtacagtcattgaagatgacaacattaagccctgtagtaactgtcgacaacgttaagaaccttttagctcaagtattggctgaagctgaacgcattaaagatgcgattgcttctggtaactacgtaccaccaatcgactaattgagttgataccccaaaaagctcggtttattgccgggcttttttattacatattatttttattaaaagtgtgtatcagaagaagggtatatgcacaaaacatgcatattttcaaaaaacaaaaataattatgcatgatttatggtgagcaaatttcttattgtattggtatgttcccgattttttggtcgcattgatatatcaatacggcacttgctttaaaccattttgcataaagtaagaagtcgtaattacaattaagacaaggaagaagaaatgcaacaagcgaatatgcttaatgaatttaaacttattattggcggtcaactttgttcaggtgaacaaggtgaactggaaattattaatcctgctactggcttaactgcggcacattgtgcaaaagcatcagttgcacaagtgaatcaagctgttagtgcagctaaacaggcttctaaagcttggcagcttgtctcgcatgatgagcgtaaatcaattttaaacaagattgcagacggtattgaaaagcacgctgaaatgcttgcagagctggtggtgcttgaacaaggtaaaccactcgcactggcacaaatggaagtgcaaggtgcaattggctggacgcgttatgcggcttctatggatttaccggtagaagtaattgaagacagtgaaactaaacgtattgaacgccatcgccaaccattgggtgtagtggcttcaattacgccatggaactggccactcatgattgcagtttggcatatcatgcctgctttacgtgcaggtaacgttgtcattagcaaaccttctgaatacacaccattatcgactttacgtttatgtgaaatcattcagcaagaagttccagcaggtgtaatctcaattgtggttggtgctggtgagattggtgaagcattatcttctcatccagatgtgcaaaaagtcgtgtttacgggatcaactcgaacagggcagcacattatggctggtgcagctcagcagctaaaacacttaactttagagcttggtggtaatgatgctggtattgtattaccagatgcaaatatcgatgaaattgctgctaagatttttaatatggcgttcttgaatgctggtcaaacatgtgcggcattaaagcgtttatatgtgcatgaaagccaatatgaggctttatctcaaaagttagctgatattgccaacgctcaagttgtgggtgatggtatggcgtcttctacaacatttggtccagtacaaaaccaaatgcaatataataaggtaaaagctcttattgctgaagcgattgcacaaggtgcaaaagcactctctggacaacaacagctaccagagcagggctactttattgcgccaactattttgactgaagtttctgactcttgccgtgtggtgcaagaagagcaatttggtccagtgttgcctgttttaaaatataccgatatcaacgatgctattgctcgtgccaatgacagtgagtttggtttgggtggttcaatctggtcttctgatcttaaagccgcacagacctatgctacacagcttcaatgtggaacagtttggattaatacccatgcagaagtactgcctcatgcacctttcggaggctggaaaatgtctggcttaggcgctgagtttggtttggaaggtttgcttgaaaatacgatcgggcaaacggttcacatcagtaaagtctaaagattagttttaaggcggatttagtatccgcctttttattttcacttttaagagtgaaaagctgagttactttattgagagtgatgatagctcatgcttttaggtttgattaaaaaatgattctgttctttaatttttttcagaacaatgtaagactttatgtgccctataaaattataagaaagtaatctttcagtcacaaattgcgaaagctgttctaaattttcagcaacgacttttaaaataaaatcagcatcaccactaattgaaaaagcatcctgaatgttatcttcagcttcaatcagctcttggaaagcctgctgtgatttcgcctcgtgtgttcttaagtttatgtgaatcatcgctgtaacttctagtcctagcgcctgttgctggatgcgtgccgtataaccgagaatcacgcctttttgttcaagcaattgacgtcgtcttgaacattgagaagcagataaaccgattaaatctccaatttcctgattggtgagtcttccattcttttgtagtgcctgaatgatttgccagtcgaacttatccattgcataaaatccttttatgatacacaaatcatgtatttttattaaaatgcgttttcattatgcacgaaatctaaaagatagatgaaatattatttttctatggaataaaaattggtctcaaaggatatagagcaatgttcatagaaattggtgaatttttaaatcttcgtctaaaacaaatgggtatccaacatctttttggtgtacctggtgattttaacctctcatatctagaacaagttgaagcagacccacaactcgaatttattggaaattgtaatgaattaaatgctgcctatgcagcagacggttatgcacgaattaacggtttttctgccttggcaaccacttatggtgtaggtgacttaagtgctattaatggtattgccggtgcctatgcagaaaatgtacctcttattcatatctcaggtattccacctttacatgcagttcaaaagggcactctcatacatcatacgttagttgatggtaactacgacaacattatgaactgtatgaaagagttcacagttgcccaaactcgtttaactcctgcaaatgcagcttctgaaattgaccgcgtattgcgtcagtgtttccttgaacgccgtcctgtacacatccaactacctggtgatattactcacgttaaaattgaagtgtctgagcgtccgctcgacctaagctacccagctgttgaacctgaattattgcaaagtgtggtaagcaaactttgtgacattattgagaatgctcaaagtccagcgcttttaattgataatgaggcttcagtttttggtgtaacttcacttttaaatgatttatctcagaaatgctcaattccatttgcaggtatgaatactgcaaaaaatattatggatgaaggctcacctcgttacatcggaacttatgtgggtggagcaagccaaccgcatgtaaaaaatatcattgaacaatctgactgtttaattggtgttggcgcgcgctttaccgatgtaggctcagctgtatttacgcatcaaattgagaccaagaactacatcgaaattaaatcttatggcttgaatatttttggtcaggattttccgggtattgaaattggacaattacttgtcgagctaaataaaaaagttgcaccacgtaaatcgtcaatacctcttcttgaaaaacaacctcagaaagtaattgaagcgccagcccaacagaagcttagtcaagatgtgctttggaactacatttcagggttcttaaaagaagatgatgtgattattggtgaagtaggaacatcaaactctgctttatcaggtatcaaacttcctgctacagctaaatatattgcacagccgctttggggttctattggttataccttgccagctttgcttggtagtttgttagctgctcctgagcgtcgtcaaattttgtttattggtgatggttcattccagcttacggtacaagaactctctacgattatccgccatggtttaaaaccaattatttttttgttgaacaatggcggctacaccattgaacgtttaattatgggtgaaaatgctgcctataacgacgtgcaaaactggaaatacactgaaattccagcggtatttaacggtaaaaaaggccatacaacttatgtggttgagactgctggacagctgaagagcgttttagacaacgttcatcaaaatgatcaattaacctttattgaattgaaactaccagcaatggatgcaccggtgagtttgaaaaaatttgcttctgtgattgcacgttttgactatggtgatcgcggctacgaaattttaaaggagcgttcccaaccagttaaatgtaaggatgcaatctctttttaaatagaagataggacacgtcttctcaaaaattaaatggactcatactaaagcaacttatgtccgaaggtcggtttctggccttcggatatagtgctgaataaaggtgtacaggaagtgacaccaacattggagataatgttatggatgcaaacaataagcacgagttaaaacaaggcttatccaatcggcatattcaactcatcgcactcggaggggcgatcggaacagggttgttcttaggtctatcacaaacaattaaactggcaggtccttcaattttattgggatatgcaattgcaggaattattgcctttttgattatgcgtcatttaggtgaaatggttgttgaagaaccggtaagcggctcttttagttattttgcgaacaaatactggggcaaaatggctggttttatgtctggctggaactactgggttttgtatgtactggtgagtatggctgaactgagtgcgattggtacttttattcagttttggtggccagaaattccgacatggctgaccgctctatttttctttattttaattaacggcattaacttggtaaatgtccgcttttttggggaatcggagttcttattttcctgcattaaaattgttgcgattttaagtatgattggcttcggtgcttatcttttactttcaggctcagcaggtccgcaagcgggtgttgcaaatttatggcaacacggtggtttcttcccgcatggtattcatggctttattatggccttggctgtcattatgtttgcattcggtggtctagagcttatcggtattgcagcagctgaaacgaaaaaacctgaaacaacaattccaaaggcagtaaaccagattgtttatcgcatcctgattttttacattggtgcaatcggtattcttttatgtctttatccatggaatatggtggcagaaggcggtagcccgtttgtcttaattttccagtccctcaatagtaatggcgttgcgaatgttctgaactttgtggtcttgattgctgctatttcggtttataacagttgtatttactgtaatagtcgtatgttgcatggtttagcagagcagggcaatgcgccagcaattttgaaaaaagtaaacagccgcggtattccggtccctgcagcaattgtgtctgcttcaattacagcagtctgtgtagtggtcaactatttaattccaggtcaagcttttcagctctttatgatgttggttgtggctgcgcttgttattaactggcttatgatctcagtcacgcatttgaaatttaccaaagcaatgaaattgcaaaagcgtcaaaccaaattccaaagcattatgagcccatggagtaattatttaactattagctttgtatgtttcattctcattattatggcgatgacaccagatatgaggctcgctgttattttggggcctatctggcttgctgttttagcgattatgtatttctttaagtatcgtaaaaaaatggtcgcaatgccggaagtacaatcaaactaataagctaaatttacagtgatattgcggttatctgacatatgacagataaccgtttttgttttgtcataatattttcatgttcgggcgaaataattttttaaaaataaaggtgacacgtaaaaaattgagaattgtgtcaataaaataattttgtaacatcaattcattaaattacttaagtttttataatttaagcataattataattttattattttgaacatttgtcatatttcccattaaatctaaatatcaaagtatttgtaaaatcatcttaaatatttgatataaaatacatttaaaaatgtgacaatgaacattataaaaatcatgaaagcgtcataatactgtaacttatttgtcatattttctattcacaatgcagctatcgaagagcgtacaagcactcaacaaaaagtgacgtacaacctattgcattaatgagagagaacagaatgcgcttaaatccacgtcaaatcgcaattgcattagcagtaactggggccgctgtaacaacgactgcaaatgcagctcgtgatacgattcaaattgctggttcttcaactgtattaccatttgccagcgttgtagctgaagagtttggtaatacattccctcaatttaaaactcctgttgtaggttctggtggttcttctgctggtttaaaacagttctgtcaaggtgttggtgacaacacaatcgacgttgcaaacgcttctcgtaaaattaaaagcactgaaatcgaagcttgtaacaaagctggtgtaaaacaaattcaagaaatcaaaattggttatgacggtattgtatttgcgtctagctcaagcaaagcagcttataaattaaaaccttaccatgtgtttgctgctttagctgcacagttaccttcaaaaggtaaattggttccaaacccttatactaactggaaccaaattgacaaatcacttcctaatgagcctattacgcttgttattcctgcgtctaaccacggtacgcgtgaagttttccaagaaaaaatggttgaagctggttgcgaagcgtatgaatacttcaagagcctagacaaagatgctcaaaagaaagcatgttctactttccgtaaagacggccgtgtaattgaaattgctggtgactatacagaaactctagctcgcttaaaaacttctccaagtgcagtaggcgtatttggtttaagtttctatgacatgaaccgtgacaagttacgtgtagcgacagtaaacaacgtagttccttctgagaaaactgtgttaaatggtacataccctgtatctcgtccactatacttctatgtaaaaggcgagcacttaaaatcagttaaaggtttaccacaatacgtagaatacttcctaagcaaaaaagcgactggtaaaggttctaaagctgagcgtgatggtttaatcgcgatgtctgatgcagaacgcgctaaagttttagctgactttaaagcaggtaaaactgttaaataagttggtttgaataggggctggtgatctcaagcgatcatcagcctttttgtctaacacgtttttcccaaattatgacaattgagaaaacagtggagaatacatgaatctgctacttatcggtgtgttgttagcccttgtggcaattgcatatcaacttgggctgagaaagagccgccacctagcaggtaagggaagcaactcggcgacattacattctcgtcctggttattatggcgcactggttgggctttggtgcggtatccctgcttttttaattttgatcatttggaacttggttgagccaagtattttaaatcatattatctttaacaacgtacctgcttctgtgacagcttctctagatgaggcagcaagaagtgtacttgttgatcgagttcaagcgatcgcttctggttttggggtaagtgatcatcccgcggcttatgagttggctgctgctcagcaatatgcaaaatttcaaactattggctcttttgccaaatttgctgttgttgtctgtgccgctttgttgggcttagtgtgggcaaagaagaaaatcagccaagaatatcgcgcacgtaaccaagttgagcgtgcaattaatgttggtttgatcttatgttctggcgttgcaattttaaccacgatcggcattgtaatgtcgatgtttggtgaggcaatgcacttcttccattttgtaagtccaatcgactttttctttggtacagaatggaaccccggctttagtacttcaggtaatgcagaaggtagttatggtttattaccattactatggggcacgctcatggtcagtggtattgccttattagttgctgtacctgttggcttaatgattgctatttatttagctgagtatgcttcgccgtggttacgctcatgggcaaaacctaccattgaagttttagcgggtattccaacaatcgtttatggtgtttttgccatgatgattattgggccattctttaaagctgctggtgcgtatgtcggtattgaaattaatgcaaccagcgctttgactgccggttttgtaatgggaattatgattatcccattcgtttcatctttgtctgatgacattattactcaagttcctcgtgcacttcgtgatggttcgttaggacttggcgcaacgaaatcagaaacgattcgccaagtggttttaccggcagctttaccgggtattacaggggcatttttattggctgtttcgcgtgccgtaggggaaaccatgattgtggttttggcagcagggaacagtccacttctacatgcaaatccgtttgaagctgtttcgacagttaccgtaaccattgtaaaacagttaacgggtgatactgattttgcgagcccacaggccttggtggcatttgcactgggattaacactctttgtgatcactttaggattaaacattgttgcactgtacattgtgcgtaaataccgtgagcaatacgaatgagtacatcaaatacatcgtctcctatggatcagaacgtatttgatccacaagctgctgctcaggcacgtgatcgccgtaaaaaagtgattgaaaaatcactggctaaacgtcaccgcaaagaaaaagctttccgctttgcaggtttgtcagcagttgttattggtcttgcattcgttgcgctactgtttggcagtattttggcaaaagggttaccagcattctggcaaaccagtatgaatgtaccagtctacttcgatcctaaagtaattgatgcaggtccagtgccagtacgcacacaaggtgaaacacctgcacattaccaagaacgttatgtcgattggcaaacgaaaatgggtatggtcgattgggatagcctgatcgtaaatggcatgattgctaaagatccttcacttgcatcacaacgcgattatttaagtagcctttatgcaagttctgaagcttatcgcttacgtgatatggtgtttgctgacccatcactcattgggaaaaaagagaacctaactttcttgggtgatgccaatgtagatgtatggctgaagggtaatattgaccgctcattaccagacgaccagcagcaacttgatccggaaatccgcaagttggcagatgaccttaaagcaaaaggtgtacttgaaaatacctttaatacgactttatttaagaatcctgactctcgtagttcaccagcgattagtggtcttgcaggcgcattcatgggttcattattcatgatgctgattgtgatcattatttcaattccaatcggtgttgccagcgcaatctatcttgaagagtttgctccaaagaatgtcattacagacattattgaagtcaacattaataaccttgctgctgtaccttcaatcgtgtttggtttgttgggcgctgcaatatttattggttggatgcatttaccgttgtcagctccttttgtcggtggtttagtattaagtttaatgacactaccaacagtcattattacaacacgtgcttctttaaaggctgtgccaccttcaattcgacaagctgccctaggtttaggtgcgtctaaagtacaaaccgttttccatcatgttttaccgttagcattgccgggcatcatgacgggtgcaattattggtgttgcacacgcactcggtgaaacggcacctttacttttaatcgggatgagtgcattcgttgcaagtgttccaaccaccccatttgatcaagcaactgctttacctgtccaagtttatctatggcagggtaatgagttgcgtaacttcttcgaaggccgtactgctgctgcgattatcgtacttcttgcattaatgattggtttaaacagccttgcaatttggttacgtaaaaagttcgaagtgcgttggtaatagaggataaatcatgaatactattgatattacgaattccttagaaaaggataagttagtgaatactgaacaatctcaacttacagatacacaactgcatcatggcacttcgtacgtttcgcattttgaaccacatgcttcaaaaaagccaaactcaaccgaaatcaagatcagtgcacaagatgcccatgtttattatggtgactttgaagcgattaaaggcatcgatttagatatttatcaaaatgaagtaattgcgtttattgggccatcaggctgcggtaaatcgactttcctgcgtactttaaaccgtatgaacgacacgattgatggctgtcgtgtgacaggtaagatcactctagataacaaaaatatctatgatccaaatctggatgttgtattgctgcgtgcacaggttggtatggtgttccaaaagccaaatccatttcctaaatctatttttgataacgtggcatatggtccgaagctacacggtttagcacgtgacaaatatgacctagaagaaattgttgaaaatagcttgcgtaaagcaggtctatgggaagaagtgaaggatcgtttaaaccaaccgggtactggcttatctggtggccagcaacaacgtttatgtattgcacgtacaattgcagtaagtccagaagtgatcttgatggatgaaccttgttctgcacttgacccaatcgcaacggcaaaagtggaagagctgatttctgaactgtctgatcaatacacaatcgttattgtaacgcactcgatgcaacaagcagcgcgtgtttcagaccgtacagcttacttccatttaggtgatttgattgaagtaaactctacagagaaagtatttactcagcctgaccatcaattgacagaagcgtacattactggccgtttcggttaattgatcgttgtaaaagaaaaagagcctagtgctctttttttatttaataaatgaaaatgactctattttgcaaaatcgctattgaattttaatcaaaagaaccacatcttaaggctataaagacaaacttatgagcatagaattttatgttattccatttgcctaaactccctgcggaaatacgtgtcagtcatttaaatgcacgtgtaaatgaacagagaaaaaaaattgcacaaaccacagcaagtcgtttagaacttttacaattggctcaacaacttgcaaaagaagctaaaattcgccgtaagaacaaccagaaaatttttgttttagattttaaaggtgacattcaggcatctgcggttgaaaatcttcgtgaagaaatcacccttattttagcaacggctaaagctggacgtgaccgtgttgtggtacgtcttgaaagccctggtggtatggttcatggatatggattggcggcagctcaattggttcgtttgcgtgatgcaggttttcatttaacgatttgtgtcgataaggtcgcggcaagtggcggctacatgatggcttgtattgcaaatgaaattatttctgcaccgtttgctgtcgtgggttcgattggtgttgtggctcaggtaccaaattttaatcgtcttttaaaagaacataacgtggacttcgaactttacacagcagggcaatataaacgtactgtcaccatgtttggtgagaatactcctgaaggtaaggcgaagtttgaagaagagctacaacaaacgcatgtgttgtttaagcactttgtagagaaatatcgtccacagcttaatgtggacaaggttgctacaggtgaacattggtatggtcaagatgcacttgatttaaaccttgtagacaaactacaaacttccgatgagtatctattagcattgttacctcagcatgatgtatatgtaattaatacccgtaaaaaagcaactttgggtgaaaaattaggtttacaagcagctcaaatggcagatagcctgatcccggctgtaatgaataaagtggctgatactttagcaaaagcgaattcaactttagttcaaatgcgcgatactaaattttaattaagatatattttcaaattaaagagtgccttttaggggtgctcttttttatgcgaaagactaaaagaatttagtttgaattgccggaatgcccattcatttttataaaaaatagatattgaataaagattcaaaaaaaattgttgataaatatacttattgaattgtgataaataagtgattttgatattttaggcaacaataaaatagcttttagatgatccatttaaaagataaacatttaaaaatataactgaaatttaggacaggaaataatgacaagaataattgtagcatccaaagagggtttggacgttctgcaagatggtcagctcaataaggtggttttaaaccaacctactattattcaaattggtgtaagtcaaaaagatatcgcatcgatggaaaagcagggtggaagtctagtcatccatttaaaaaatggagaaacaattgtcttagaaaatttctttaatgaagcaacgaatacaacagagcattcactcgtttttccaactgaacaaggaaaatttgttgaagcacaatttgatgctcaaggtaaggttatagattatagaggcttaaatcatgttacggatttggcctataccagtaccagcccttcaactgcaacaatggccgttgataatgatccaagcttttcaatgggtaatgtactaaaagcaggcttagcagttttagccgctgaaggtttatatctttgggcatttgataaagatgacaaagatgattcacccagcactcccgatttaatagcacctgctgctcctacagctacgcttgctgatgatactgtgacagtgactggcaaaactgaagcaaatgcgaaaatctacattaaagatgcagcaggtaatacagtggcctcaggtgttgctgatgcgagcggaaattacacgattaaattagataagccgttagtgaatggggataaattaaatgttattgcccaagatgcggctggaaataattctaaagttactgtggtaacaggaacaaaagatacaattgccccagatgttccacaagctcaattgagtgatgatggttccttagtgacaggtaaagcagaagcaaatgcaaaaattactgtttatgatgccactggcaaagtattaggaactgtttttgcgaataaagatggtatttattctttaaaacttactccaccattaaccagtgaagcgggcggtaaagtggttgccgaagatgctgcgggtaacaaatctgaggaagttaaaattattgcgggtaaagataccataccaccagcatctccttttgttgaagtaaataaagaaggatcggtaatccatggtaaaactgaagcaaatgcaaaagttcaaataaaagatgccgatggtaaagtgattggaagtgggaccgccgatgctcaaggtgaatttcaaattacactttcacctgctttaaaagaggcgcaaaagggcacagtggttgtggaagatgctgctggtaatgtatctaaaccagttgaaattacgccaggctttgactcgattgcaccagataaaccgactgttcaaattaatacagatggtacttctgtaaccggtacggctgaggccaatgccaaaattgaaattaaagatacaacagggaaggtaattggtagtggaacagcggatgcgaatggaaaatttacaatttctatttcaccagctttaacggataataaacatgcttcggtatcagctatagataatgctggaaataagtctgaagttgttgatattgtaggtacaaaagatacaacaccaccagcaaaacctatattaaatagcgtagatgatgatgtaggcgctgttaaaggagctataacggctggttctgaaactgacgatgctagaccaaaacttacaggctcaggtgaagcaaatgcaactcttacgatttatgataatggtgttgcaattggagttgtgacggtaacaagtggtagatcttggtcatttacatttgataaagacttagctcttggtaagcatactattactttgactcaaactgatgcggcaggccttaccagtgaggcaagttctccatttaccttttatgtagttgcaccgaaaactgcgagcctgtctgaaacttcagtagatactttaagtacagaagggccatctttggcagatagtgtcggactgcatactttaaaggcagcgcaaagtacaacaactgagacgaataacccgcagaaatcggttcctttagatgatttattaaaaagttctacggctagtgaatcagacccaatcgcaaagcttctctcatcaacagcgttaaaaacgactcaggcatctgagccaatcgaagtaaatgcatcagttggtcagataacatcaaatcctgatcatcctttacctgatacaacttcttcggttttacaaaaccttttagatcaaacttatccagttgtttagggtatttgagacaacatgtaaaaagcgctcaatgagcgcttttttaattttaatttattgtttgattttttggtgttgtgagaagagcgattagcccatagaggattgcgccaattgtagcgattaacatgtctttatgtgcatcccacatatcaccttgttgcccattataattttcagcttgttcaggtgatagcccgattgcaattacccattcgatcagttcataaaagacactagacgccatcacaaactggactacaagtaagaataaagaaaaaggacgtgcagtgggtaaccatacttggaatacacgataaataagaggatagagcaaaacaccataggcaagatgaactaaacgatcatacatattgcgggaccaacccatatattgatctaggttgaaatggaacacctgttgtatccagtcattgtatggaacgtaggagtagagatagtgagcaccaataatatggattaataaaaacagtagataaaaagtaaaacttaagaaatccagtccaatttttttgaaaataataaaaagcagaatcaccataaaaacagtgccagcttgatgaagcaaataagcctcaaactcaagtggttgaatacctgaaatgataatggcaataaaaagcaggccaagtgcaatatagtgtttaactttgaattctttttcgatcattttataaataagtctttattctgatttgtatgagtgtaataaaaaagcgaagcctaagcttcgctttttataacttttttaattagattttgctaattaattcgttaatttgtttagcttgttcagcagcattacctgtgtaagttgcaggtgtaagctcagctaagcgggcacgctcttcacttggtacttgagcaagttcgttaccatttacgaagtcaaccatcatgtcacgcgtcattgcttgaccacgagttaatgcttttaacttctcatatggtttttcaacattataacgacgcataactgtttgaattggctctgcaagaacttcttgagcttggtcaagatcttcatttaagcggtttgcattgagttcaagtttaccaataccttttaagcaagcatcaaaagcaattaagctttgagcaaaaccaacacccatgttacgaagtacagttgagtcagttaagtcacgctgccagcgagaaattggtaatttttcgcctaagtgagccaacactgcatttgcaatacctaagttaccttcagagttttcaaagtcgattgggttaactttgtgcggcatagttgatgagccaacttcaccttctttaagtttttgcttgaagtaacctaaagagatataaccccatacgtcacggttaaagtcgatcaaaattgtattgaaacgacgtaacgcgtcaaataattcagccatgtagtcgtgtggctcaatttgagttgtatatgggttaaatgttaaacctaaagattcaacaaaagcttgtgaatgcgctggccaatccacatttggataagcagaaaggtgagcattgtagttacctacagcaccattgattttgcctagtaattcaacattttcaaattgtttgatttggcgagctaaacgatatgcaacgttcgccatttctttacccaaagttgttgggctagcagtttgaccatgtgtacgagacaacatcggttgttcagcatgagttgtagctaaagcagagattgcatttaaaatttgcttcatgcttgatactaaaacttcacgaccgtttttaagcataagtgcatgagacaagttattgatgtcttctgatgtacaagcaaagtgaatgaactcacccgcattttgtaattcagcaatacctgcaattttctctttcaagaagtattcaactgcttttacgtcatggttagttgtgcgttcaatttctttaatgcggttcgcatcttcttcagagaagttgcttacgattgcatctagtgctgcatttgtttcagctgagaaaggagcaacttcaacaatttccggacggttagaaagcgcttgtaaccaacgcacttccacagtgacacgagcatgaattaaaccaaactcagaaagaaaagggcgtagcgcatcacatttgctggcataacgtccatctaatggtgatagtgcggttaaagcgttcataacgattccttaatgctggaataaacataaaacaaaaataatctcgttacagccttagataacttggtactgtaaacgagcaagtgcttgaatatcctgtagcaatttacgtttgctaaaaatcatgttccatgaactaccgccgagttgtcgccataaatgggccatttgtagccccgtaaacagacaagcacgaatacggttggtatggttggtatctttaaatgcctcagcattaccacgaacaagaatgcgtggattaatctgtccggcagtatcaacataggtttgcgccaaattggctaaaatacttgggtgtaaatagttattatcaaaaaaagaaagctgttttaaaatcttctgctgcgctttttcaataatcgccacatattcaggattgctatagacctttttctctaactgcaaaagtgacatcgcataagacataggaagttttgcactacgcattttaggcaaacgagatttaggcgcattggtaaaaggctgagtgatacaattttcaagagttttaagacccaacgaaatatcagccaattgattaaaaaaatccaacgtctgaacagcattattatttgttgtagggcgaatatttaaactcgcctttattaataactcaaaataaaagttaccactttcaccaatactttgctgacctgtcatggcggtcatatgcgtaagctgggtcgcttgaaataccccagccaaggcaagggcacggttttggcgaacattcaaggcttgtgattgttgaaagggtaactccaccatgccattcattcccttaaataaaatttggtgtaggggcgtttgtatggtgaataacacccccgcctaggcaaacttcatccgaataaaatacaacactttggcctggtgtaactgcacgttgaggttcatcaaactcaacacgaacaccatgctcactattttcatcaataaacactgtacaagcttgatcaggctggcgatagcgtgttttagcggtgcaacgtaatccttcagccggaatattttgctcgcctgctacccagtcaatggcctcactccaaagctgtgtactttgcataagtgggtgatcatgtccttggccgaccactaaacggttattggcaacatctttatgaagtacaaaccatgcaccttctgatgcacctttcataccgcctagaccaataccgccacgttgaccgagcgtatagtacatcagaccgtgatgttcaccaacttctttgccgttatcaagtacaattttacctggttgagcgggtaaatattgtttaaggaagtcattaaagcgacgttcaccgataaaacatataccagttgaatcttttttcttcgcagttgctaagtccagttcttcagcaattctacgaacttccggtttttcaatttcccctaccgggaaaagggttttattaatttcacggccatgcactgcatgtaagaaataagtttggtctttatttttatctaaaccacgtaataaaggtgcatatgcttcacctttagagttataagcagtttcagcacgacgagcataatgacctgttgcaataaaatctgcacctaaggtcatggcatgatctaaaaatgcgcgaaacttaatttctttattacataagatatctgggtttggagtgcgaccggctgcatattcagccaagaagtgttcgaatacgcggtcccaatattccatagcaaagtttgcagtatgaagcttaataccgattttatctgcgactgcttgagcatcggctaaatcttccattgccgtacagtattccgtgccgtcatcttcctcccagtttttcatgaaaaggccttcaacttgataaccctgttgaagtaagagcgccgcagaaacagaggaatctacgccaccagacataccgacgatgacacgttgttgcataggactaggcatccaaatgagaagttaatgagggagagaaagggtgctcataaataagagctaaaggataatgttgtcctttcatggcgtcttcaatggctttaatgacaagaggactacgtgcacgggcagattctttaagttcatctagagtcatccagacagcagaaacaatacctgtatcaagttttgggtcgctttcgacgtgggtcacatgtgctaaaaagcagaagcgataataagtacggtccggaaacataggcggggtataagtataaataccaagtagggcatctatatctatatgatgtcctgtttcttcaagcgtttcacggatcgctgcttctgttagtgtttcaccacattccacatgaccagcaggttgattaaacactgtgtgtacaaaaccttcgctatgttcttcgacaaaaagatagcgtccatctttttctacgactgtagcgacagtgacatgaggagtccatgcggccataaaaaagcaccatgaatttaaaagtcgtatgatacgaaatttaggggtttttggctacggtcatcttacaaacgatagagcatgcgaataactctatcgtttgaaaaactcgatttgttttaatttatttgattatctttatggttattttgcacttttacataatgtcttgctgagtaaggtaaaaatgccaattctttttcggttagaggacgtacttgttgtacggggcttccaacataaagataaccactttttaagactttacgaggcggaactaagcttcccgcaccaatcatcacatcatcttcaataacaacatcatctaaaataaccgtattgattccgactagtacgcggttaccaatagtacagccatgtaaggtaacatgatggcctactgtcacatcttcaccaataataagaggtgaaccattaggttttgtatcatttttatggctgacatgtagcatacagtggtcttgtacattactgtttttgccaatttgaatactgtttacatctccgcgaatgactgcaaaaggccacaccgaaacattttcggccaatttaacatcacctacaaccacggacatttcatcaatgtaacagcttggatcaatttgtgggtgatggtctaaataaggacggatgttttttgccatgagaagtatcaatagaaaatttagtaaaagtataaaataaaaaagcactcacgctaatagcatgagtgcttaattcaactattctaaaattatttaaatttagaataagttgctgaagaattgtttgatatggtcaattaaacgtgcgaagaaaccagcttcttcaacaggttttaaagcaaccaatggtttttcagcaataactttaccatctaaactagcaacaagcttaccaacgacttgacctttttgaagtggtgcacttaggttcggttgaacaaccaactgagttttaatgccgtccgctttgcctttaggcatagtcacattaaagttttcagctaaaccaacctgaacttcattttctttaccaaaccaaactttagcttttgcaagcacttggtttgcaggttgtacatttgcagtttcaaagtttgcaaaaccccatgccaataatgcacgagtttggtcagcacgttcagacatgcttggtgtaccgaaaataactgagattaaacgcattggaccgcgtttacttgaagttgttaagcagtaaccagcttcatcagtatggcctgtttttaagccatcaacacttgggtcagtgtaaagtaaagcattacggttaccttgtttgataccgttaaatgtgaattctttttcagaataaatcgggtagtattttgagctgtctttaataatatgttgtgctaaaacagccatatcttttgcagttgagtaatgaccttcagctggcataccagttgagttaataaactgggtattggtcattccgatacgttttgcttcctggttcatcatgtgagcaaaagtaccttcattcccagcaatatgttcagccattgcttttgatgcatcattacctgactggataataataccgcgaagcatttctaaaacagttgctgtgccatttaatggaacatacatacatgattcagaactactgcctttacaccaagcagattcattcatacgaacctgttcattttcggtaagctcaccttttaataatttttgttcaatgatgtagcttgtcatcattttagtcatagaagcaggagcaagcttttcattttcatttttagaagcgagaatttgtcctgtctcgtaatccattaatacataagacttattatttaattctggcggagctgataagacagttgctgcataagaaaaacttggtaagaggaggagtgcagcaatagcgctttttcgagtcattctaggtaattccaatatcttgtatgaagcagaagagcctagcattttaggataaagcaaagccgacttctatgggggaagtcggctttttcaaacagtattgtaactagagagtttttaactaatttagttttgcgattgataagctttcacgtcttggcaaactaacgtattttgttcgttaccagcagcttttgcatcattacgtgcttcttttaagactttcttgaagctcttgtctttactacgtttttctaaagctgcaactggatcggcttcatttggcaaatagtcttttacaagacgctcataaccttgagcaaattcggcatcttttttaccaattaaacttgggcaaatttcagaaagtacttgaattgctgctaattcttccggtgtagtacctttggacggtgtaacttcaacaacattttcattttcagttttcttttcagctgtttttttcttgtcagcagcataacccactgttgccattgtcatgagtaaaacaacagaaagtgattgaactaaactttttttcataaacatggataacctgaaacaaaaatttgaaatatgccgatagcttaaacaatttaaacgctaaaaaaatggaaaaaatgtattgttatgtaggttttctgctttatctcaacagaaaaccccaaagataagtgtactgattgagctaagctcttaatctttgtaatttaccacttcctcacaaagttcatgttgttcgtggtgatccatttctttggcagcctgacgtgcttcacttaacagggttttatattctgaatcattttgcagcgcagagaaggtaattgatttattggaataaccactcaggtacattgcaataatcttttgagtattggtttcaagttttttatttgcaccaacaaaagtagggcaaatttcctgtaagacttgagtagaggcaatgtcatctttaattaagctgtcagcttcttgtgttgagataccctcatcagcaaaaaccgcttgagtacacaatgtgatactgatccccaatacttgaaaaaaaggagcgaaagttttcattttttcacaattttataatgctatggaggcataaatatatataattcaacaaataattcaattgagaaaacctctgggtttatttgtcgagaaagattttttgtgaatattttaattgccaatgatgacggtgtctttgcaccaggtatacaagctttagctgacgcattaaaaccactaggccgtgttgtagtggttgctccagaaagtgaaagaagcgggttttcgagtgccttaactttagatcgtcctttacgtcctattcaaattgctgaagatgtatgggctgttaatggaacaccagccgattgtgtttatttatccatgaatggattatttgatttcgaatttgatttggttgtcagtgggatcaatagtggcgcaaatttaggcgatgatgttttatattcgggaactgttggtgcagcctttgaaggtcgtttaatgaaacaacctgcaattgcggtttctttggctgggcctgatgtacgttcatacgaccataaagatgattatgcgcaagcagctaaatgggtacatgactttatcgcaaaaggattacctgcactgccaccgcgacatatttttaatattaatattccagatgtacctcagcttaaaggtacacaaattacttaccaaggccgccgtgcccaatctaaacctatcaccagccatgtagaccctagaggaagacaggtttactggattggtcttgcgggtgaggcggtaactgatccacagcgtattgctagtcaaatacaatctgatttttttgcggtcgcgaatggttttgtgagcgtgacgccaattcagatggatgcaacaaactatgcggttttagaagatttgcaggccagtttggggtaataaactgagccgaatgttataactttgtgaataaagaaaaagaggaacatgtttcctcttacttttttggtactcttagccgaaatgatttgtagcatttagtgagggagatcgatgcatttaactgggcaacaaagcagattgcatattcaaagagacaaaataatgaaaattatgatgttgtctgtagctgtaggttttactgttgcaatggcaggatgtgcttctaaaccacaaattaataatagttctcgctatgcaatggctcctaactattacacagtccgttcaggtgatactttaagtggtattgcaatgcgctatggtctggactatctcagtattgcagagatgaatggtattgcaccgccatatcgtatttatgttaatcaatcattacgattgaagaaatcttcttcaccaagaactgtgtcgacacaagtcatggcgcaaccggaaccaattaagcgtcaaacaattgctttaccgacaactactgcaccaaccacaaccactccaccgccagcaactgttgcgccatcaaccaatacaacagtgggagcatctattccaagctcaagcttacgttgggtgaaaccaaataacggtccggttattcaaggctttaatttggcgaataatgtcaaaggaatccgttacggtggtaaccaaggtgacccgatttatgcggcggctgatggtcaagttgtatacgcagccgatggtctgaaagaatatggtaacttagttttaattaaacatattgatggttacatcagtgcgtatgcccacaatagcaagatgatggtgaagagtggtgacaatgtaaccgcaggccaaaagattgctgaaatggggtcttcaggggcatctcgcgttatgcttgagttccaaattcgccttgacggtaaaccgatcaaccctgcaaatcttttaccaaattagctaatgcattaaatataggtttcctcgtataatacaattggttgctttcattacaacaataagcattttttataaatttagaattagatttgaggaaacctatgttagatcagcttcgtgcgatgggtgtttttgcttgtgtggttgaaaaaagttcatttagtggtgcggcacgtgaattaggcattacaacaagtgctgtaagtcagcaaatccgttctcttgaaaatgaaatggatgtaattttattacatcgttctacgcgaaaacttagtttgactgaggcagggcaggcttttttctcaagttgccaagaaatgttggcagccgcagaaagaggcaaaatcagaatcaatgaattgcgagatgatttgattggtgacttgcgtattgcaactacccctgatttagcagttcagcacattattcctgctttatctcactggatgtctgcccatcgtggtctatctgttcattttgaagtggggcatcgatatatcgatttaatcgaagagcgaattgatattgcagtgcgcatgagttctacagcggtagaagagagcgactctgttattcctatggcttttgtcgatcagattttggtagcctctcccagctatctcaatcaaacaagcccgatcttgcatccaaatgatttaaacaaccatgagttgctttctatcaatgcaatgaatgactcacgtagttttaattttcagcacgctaaaactggtgaaaaattaaatatagagatggcaagccgtttgcaaagtaataatttacaagtggctaaagcgctatgccagcaagggcatggaattgccagaattttatatttagatgctcaaaaagaattaaagaatggttctttaattgaaatccttccagattggaaactcccagctttcactttatacgcagagattgcaaaacacgatcaacagccaatgaaaattcaacgttgtgtcgaagcgcttaagcaatactttagtcagttggctggcggaagagcaatgcagattgttcgttaatttttacctcattcatagaaaagggcttgtaaaaacaagcccttttttatgtcagtgttatttttgctttagcgtagcaacttcctcttgagtttcttgaggaagatcatcggctgtgagctcttcatgctttttaatttttttcttatttttctttttcttctttggctcctcttcaacttctgcgccatcttcgatcgcttgccagtattcaagctgttccattacagcagcataaatagagtgtttgctgtatttgccttttttgtcgagagtaccaacagggcgagccattaaaatctcaagtgcttgatcaattgtatcaattgcatggatatggaattgacccattcgcaccgcatcaatcacatcttgacgtagcattaagtgttgcatgttttggcgtggaataatgacaccctgtttgccagttaaaccttgtagcttacatgcatcatagaagccttcaattttcgcatttacgccaccaattggttgaacttgacctaactggttcatagaaccggtaattgcccatgactgatcaattggtaactgactaattgcagagattaatgcagaaagctcggcaactgttgcactgtcgccgtccacttggccgtagctctgttcaaaagccagagcagcagaaaaatgtaaaatctgttcacgtccaaagtgagcttttaagaagctagacatgagtaacacgcctttggcatgcaatgaaccacctagttctacgctacgttcaatatcaagaatatcaccaccgccttgataaaccgaggcagttaagcgtgaaggtaaaccaaactcaacatctgcatagtgaatgacagagagggcattaatttgacctaaacgatggccagaagtttcgattaactgggttccacgcgataaatcttgccagtaaagttctcttaaatagcctaagcgatattgtcggtgttgtagggcaaggttaatgtgctggtcggttaccatcttatcattggctttaaatgcatgatgatgcgcttcacgaataagatcacccaacgttgaagcatgtaacgacaatgagctttggtcttcggcctgacggcttgagtctgtcagtaatgccgctagagcactgcggtcaaatggaagcagtttatcggcttgtacatagtctgcaatcagctgcatataagcttgttcattttcgtcattacgttgtaatgtatcggtaaaatctgcgcgaattttaaatacgctaccaagctctggttctacttctaaaatttcataataaatctcaggctctgccatcagtaccactttaatatcaagtggaatagcagcaggctctatcgagatactgccggttaaagtcaacatatgttcaagagaagagagcttgagttggcccgattttaaggcacgctttaaaccttgccatgcataaggctgttcgagtagttgttcagcctccagcattaaaaaaccaccattggcttgatgtagggcaccgggacgaataagagtgaaatctgtagtaattgtgccgttgtgggtgagttgttctacatgacccagcaagttgtagtgcgttgggaaatcttcaaaaataactggtgcaccgctatttggcttgtttgagacaatcacatttgcttgataacgcgctggtacacgattgaacatagcaggagcaaagtcatcttcttcttgttctaaaattaactcaacattgtcaatgatatcttgagcatactgttttaaataatcttcaaggcctttcacttgcccatatttatttaaaattaagtccatgcgtggcataaccacttgagtggcgatgtctcgatttaaaacagaaactttgtcgcgtgcatcatcttctaagtcgcccaaatgcagaccaagacgctcaagctttttatccatatagcgaatattggctgcaatctcagcacgctgtttgctatttaaagcgtcaatttctgtttgagtcagttcttgaacctgattatcttttaactgtacaggtacaaagccatgtttctcatttcgagaaatcaattttagatcaagttcttcgccttctttcgttaattcgacaagtgcttgttgctgttcatcaccagtttcctgacggattcgctcgatacggttatgataagtctctgcgctaaaacgacgttcaagctgctttaaaataatttgccaagtttgatgaagagtttgttgaaacttggttccttgtccagcaggaaagcgtagcgcaataggctgacgagcctgtttaaagttataaacatatacccaatcatctggagtaggcactgttttggcatgttgttgtagtaaacgcttaatcatggtgcgtttacctaagcctgctgttcctaccgcaaaaatgttataaccagagtagggtaaggaaataccggcttctaccgaagctttggcgcgatcttgccctaaaaagttgttgagcggcttgatgcgttttgttgaggctggaatattttcaaaatttggaatatgcgtaagttgttcgggttttaacgctgttttatctaaagtcattttaatatcaggttgctcaaaagctgaaggaaatgcatttattgtgacgtttgtggtgtttgttttagcgagtgataaagttgaagatgtcacttgatcaagtttttgtgtcactgttgatatccagcaaaagaaaacgaaggttgaagattaaaggtatacaggtttagcataaaatatcaagcaaacttgccgtttttatcatcaaaacaaaacttgattgcataaagaatcttgaaagcaattgtaagaagcgattgaataggcgcatttataatttatggaaaataaaaaacgaatgaccacacaaacctctggttgggtctcggcgtttaaagcatttttagaccgtcgtgcattaattatgctatttctgggtttttctgccggaatacccattttattgattttctctagtctctctttatggctaggtgaagcaggcattgataaaagtgccgtcacttttttcagttgggcggctttaggatattcctttaaatttgtttgggctcccttaattgatgagttacctgtaccagtcttaactaaagctttaggccgaagacgtgcatggttgcttattgcgcagtgtttaatcgtacttgcgatatgtacaatggcttttgccgaccctgctttaggtcacagttatcttgttcaaatggcggcaggcgcagttttacttggcttctcggctgcaacgcaagatattgtgattgatgcttatcgtattgagctggctgaaactgaaatgcagacagtgttggcatcaacttataatgcgggttaccggatcggtatgattgtagctggtgctggtgcattattcttagcggcgcatttggggaccgcaaaaggaaattatatttacgaggcttggaagacgacctatttaacgatggcagcagtcatgttggtcggtattattacaactttactcgttcgtgaacctaaagttgatcgtatatataaaaactataaatcaagtgattattaccgtctggttttagtattttttattgcagttatctcatttgtattaacctatatttactcaggccaagttaccgaagcaatttcaaaagctggcaatattcaagatagtgctgctttatttggtttagaagctttaaggttcttaacggcgacaggtgttgccattctagctggttatctattggttaaaataggtgtggtgaaccagcaaatggctaaggaaacttggattgccccaattctggatttctttaaacgttatggtgtcaaacttgccttagtacttctattcttgattgggttcttccgtatttcagacattattgctggtgtgatttctaatgtcttttatcaagatctgaactttagcaaagaacaaattgctgaagccgtaaaagtttatggtgttattttcagtttggtgggtggtttcttaggtggcttattagctcaacgtatgaacatcatgaaactgatgttcgttggtgctgtattggcaagctctactaatctcattttcattggcttagtaaaatctggaaaaccgcttgatatggtggatgtccaaattgggaataaccattataaagtgaagccagatgaagtggggtattggaagctcaaagtgccaagctcaagttttaatggcacccaacaaattgatgtcaaagctggttatgctttgcaagatcaacaagccgagactatcgttcgggctcaacctctagtgacaactcactctgagagtgttcctttacaaattttacctttaatgggaagtgatcagatatcggctaactcttccgaaggcagtgtcgtgattcgtgggcagtattttggtaaagccttatcacctactcaaaagattgtggtgaatcttgatggacaaaattttgatgcaaaaatgacagatcaaaagggcgtgtttaacgcagcaattgatatgcaaaaattattgtcatcaccaagtaagcaacttactgcttcaattgtcgatggaaatcaaaaaatattatcgattgctcaccattatgaagtcgcttcaaattctgtaccaaaacctgaattagatgtgaatattgatcctttaccgtacattgatactcaatcaggtcaagaagttgagattagtggtaaagtcattaaaccttatagctcactatggctttattttgccattgttgttgataacatggcttcaggcttagccggtgcggcatttattgcgttcctttcaagtttgaccagtgtgtcatttactgctgttcaatatgcgatctttagctcacttatgacccttaccccaaaacttttaggtggatattcgggtaccatagtgagtaatattggatacccaaacttctttttgatgaccacaatgatcgggattccaatcttaattttagttgtttgggttggaaaactgcttaaagatcatcaaacacatgacatagaaaaggcaggtgaataaacatgcgaatgcttcatacaatgttgcgagtaggcaatttagaacaatctttaaagttctataccgaagtattagggatgaagttacttcgtaagcgtgattatgaagaaggtcgctttacactggcatttgttggttatggcgatgaagaaaataataccgtgcttgaacttactcataactgggatacctcaagttatgatttaggaaatggctatggtcacattgcgattggtgttgaagatgcttataaagcatgtgaagaaatcaaagcacgtggtggtaaagtcgttcgtgaagctggcccaatgaagggtggtgtaacggtgattgcatttgttgaagatccggatggctacaaagtcgagcttattcaacaagacgcaaatgctagaaataattaaataaatgactcaggcgctttaagatttaggtcttaaaagtctagctttatttttatagcccagtatgatgaaggcttgaccaaatggtcaatttatcaactgggcttttctttatctaaaataatcataggatgtgaacatgctgaagttcttggcacttgatcgatttacaattttgttggttggcatggtactactagcaactttttttccagtcagtggtcaagctgcgcagtatttcaatacattaactacagtcgcgattgctattttatttttcttgcatggtgccaagctgtctcgtgaggcagtcattgaaggtattttgcattggaaaatgcacttactggtatttgcaattacattctttatttttcctgctattggtttattggctaaacctattcttttacctctattagggcagcagctctattggggttttttgtttatgtgtttcttgccatctactgttcagtcttctattgcatttacttcagttgcaaaagggaatgtagcgggggcagtatgtagtgcatctttctcaaacttggtaggtatgtttattacgccagttttagtcagtttctttattttaggacaaagtcagcacggatttgatcctacatcttcaattatacaaattactttgttgctattagtgccttttgttttagggcaattacttcgtccctatgtttttccatatatggcaaaagtaccaagtattgtaaaagcatttgaccaaggttcaattttgatggtggtctatggtgcatttagtggggcagtggttgcggggctttggcatcaggtgagttggaaaaccttactgcttttaaccattgcttgttctgttttactcaccattattatgctgcttgcactttatttaccgcgcgcttttggttttaaccgagctgatcaaattacagtgttcttttgtggctcaaaaaagaccttggccagtggtgtacctatggcacaaatcttatttattggccaacctttaggtatgattgttttaccaattatgatctttcaccaaatccagttaatggtctgtggggtaattgcaaattacttggctaaatcccaagattaattcgcaaaaaaaatttatatggcgtataatactgcccacttgttgtgcttagctctaacccttgaggtttcggtgggccaaaagaatggtctgttgtggtgttgatctgcttgtaaaagctttcctcaatttaattgagagtgatcaattgcgatgacagcttaagcctttcttcaattaggagtaatcgacgatgcgcgccgatattcacccaaaatatgaaaaattagttgcaacttgttcttgcggtaacgtaatcgaaactcgttctgctttaggtaaagaaactatttaccttgacgtatgttcagcttgccaccctttctacactggtaaacaaaagaatgtagacactggtggtcgtatcgacaaattcaaacaacgttttgctggtatgtctcgctctatcaagcgttaatacttcaaaacgaaacaaaaaacgggcttatgcccgttttttgtttttaatatacaagaccattattggtcttgtacatctgttaagcggtcaagttttttctggaaataatccccttgtagaaagcgcgcttctacattccatgcattggcaaacaggttcatatcattcaagtgagctaataaaattccaatcggttttacagtcaaatagttcaatattttttcttgcaagttattaagcccttggtctgagcttaatagatcagttttgctggactgtaattttacaagatgaatatcaagctgctgtaatattgaatcgctatacatagaagaagcaaaatctcgaattgaaatttccgcaccatgttggcgtaagcgagcaatgtgctgttgagcaattggaagataaggctgaagagcttgttctgaaaattgcaaaatcagtgggctttcaattttacttccgataatagttagtagtttggaaatcagctcagggaatgttttatcttttagcaaaatatcaatattaaggttaataatgagtttcgctttaggatactgagcaatgaaattatgaagctgtttacacgcttctaccaatatccagcggtctaactgaattgaaagttcggcatcttctttaagatcacttaaatcatttaagtcataccattgttcaccagcaataaaaccacttgtcacttcatagttatgagtttcttggtcatgcttatcgtaaatttgctggtacttcagatgtatttcgccctgagctagtttttgtcttaattgctggagcaaagaggactgaggcgtatggtcaaaatgttcaattgttaaatcaagaggaacagcttcaatgctcggtgaaaccgttttgtctacggttggcattacttcaagttgaggtgtaacctgaggtaagccttgcttttccgcctcgttcaataatgagctaaaagagttctcagttaatggttggttgagaaaagcataaccaagctttaactgcactgaaaagttttgctcattcacttttaacaagtgttctttttgcaaagtttgtaaactcgtcagctgtgagtttaaaactgaactattttcggcttgtaaaatcccgacataactacccaagtcgacttggaaaatcggcatctgtgcatggtcttttaaaaaaccatggagctgattgaaatattgccctaaagtttgccaaccctgttgaaaaattcgttctgggcactgtgcaagtctaaataaaacaacggcgtttgcttgggcagggtgggtcgataaatgacgattaatctgcggccaagctgcactcaacccaacacttttttcggacggagcactatttgctggagcagttaaatcaacttgatagtcgatggtgagttgtactgcgtcttcttcttggcttggaataaactcgagttttagcgcattattaccagaaataccctgatgctgactctgaatttcaaagcgtgcttgatcgaactggcctaaagaaattttcttaaaccgctgtttaaaaatatttaaatcgttgggttgtaagacatctaaaatcggcaatccaataatatcttcttctttctggaaaccaaaaagattcaaatattcggtatttgccttaatgtggatgccttcttgaaaaatagcaaccgctttatggctgttgtcgaccagcgtttgcgtatgcgtatgaatggtatcaagctcggccaaaagatgttgttccgtctgtaaaaggcggctgtatgacagtgcccgaaccagcgtaatatagaaataatctagcggttctaatgggactacatcataaatccctttttgaatatagctttgatattgctgcgcttggtaatcatctggctgtaaaagtaatattggaagctgcggctgttctgaggcttgaacaagggagagagtttgttcaattttcaaatcataggcgcgaccaaaaataatgacatcccaagatgtattgagctgcttttcaaaactttttaaatcatcaagtaataaggcattaacttgataatcattccccgataataaatttaaaatttggttataacgtaactggttatcatcaataatgagtaaacgtatttcagtacgttttaaccttttagatagtaaagagtttctcactttaatgcttcccataaatcttggctattcacggtgttattctttttcagcatgaactgatcaagcaggtactgttgctgctcattcagaagctcaaattgaaattgaataaaactttgagtaatgagttgtgctttgagtagatacactttgatttcttctgtccccaatcgtaaatgaattgtttgttgctctctaaaaatttgagaccccggtaaaataagcgtgttttgtatttcttctaagttttgagtttgtagtaataatgcagggtgataattacgtgtatgacgctctgcctgaatatgtacagcgcaagggaacatggcttgtgaaagaatttctaaacccagttccagacttttttctgtagattgtttaatccagcgaattacaccgccacgccactgaccatgtagcgtttccttcaccaaaatatattcgccagttcttaagtttttaggtgcttcgccggaccatttaatacgatagccattaacactaatatcaagtacggtagtttgataaatggttttactctcacggcttaagcgttgataagacgaggtttgttgttcttttttctctaaattggataagactttcgattcactttgtaaattatagttattacttagttgtagcgtttcttcaaagtttttggctttagacaaatagaaatgtgcagtacttaagccaaaacaaatttgtaaagctgcattatattcataacgctcatgacggcgctgtgctgtggtgcccaaaatcgtttgaacgtgaaactttaatgcgggacttaaataaatcttttcatttttagacatatattgagcatttttatgcatggtggcagtgacatgctcaagcaaagcttgcgtgctaataaaaatacttgggttgaaattcgagctttgttttttgttatatacaggcggatgatctttagttgggtccaccacatactttgttgaagcagtgtctttcggcaagatctgaatcatgcgtgcccaatcaaaactacattgaaacagggcttgaatttctgactggcgaatctgattggtgttaaaaatatctaataaaataagctgtgcataagcctgcgtaatattggctaacgggtgctgtacaccttgaatatgattaatattggttaaatgatatttgtattgaaccgctgtttcataaagctggtgggcaattaaccattgacctttgacaggttcgctatagagcatatgctgttgatataaaagattggtcaactgctgcaatgcgtggaatgtcgccagaattcgtgcggtttgtaagtttttcttttgtttaaaagagaacaaagaaaacttctgcttttgtagctgttcgtggcttgtttgcgcaatatttaaataaatactggcaaaataacagcgcagaagcatggccagctcaataatgtgctcgttacggtcggtactaatgacaccttggttaaagaagtttttttctaaactcgccaacacattattaatggttgggtgaagtgtctgaattaagtcaaagcgtaaggtttcactacaatttaactcattcagttccaaaattgctgtaaatagcgcttttgaagtatcacccaattgcataatagaaagggtagtgacccactcattaagatctttaatgttggcttcacaaaagcttaaccgttcacgagtaagtgcggtttgattgtgaaaaatgtccgaaagcgcattattcatcatcacttattatataactcaaaaagttgtagccccaaaaagcggtgttttattcttttcgcccgcaatttccctgacgagtttaggaaccaaatatcctggtaggctcgctaacacgtcttgatatatcgcatctatttcagatggtattaaatcaaaatgttgtgcgccttttactttatctaatacatgtaagtaatatggcataacgcgagcttcaaatagacgataacttaaatcagttaaagtttgagcagaatcattcacccctttaagcaatactgcctgatttagaacagtaatgtggtgttcagatagctgcaacaattttgaacaagtaaagtcatcgagttcagaagcatggtttgagtgtaccaccagaataatacgcagcctactgttttttaataaagaaataagctcttcgtcgatacggtttggaatgacaattggaacgcgtgaatgaattctcagaatcttcacttgtttgagagatgataaacgttctaaccaaagcgctaatttacggttagaaagcgtaagagggtcacctccgcttaaaatcacttcgttaatatcggggttcgactcgatataatttttaatgtttagccaatcttcatttttaggtaaattttcctgataaggaaagtgacggcggaagcagtaacggcaatggaccgcacatgcgccggtcaaagtcagtaaaaaacgagatttatatttatgtaaaacacccggtaactgattggctgcttcttcacctaaagggtcggtgacaaactcaggatgttcctcaagttctaaatgatgtggcaacacttggagtaaaagcggatcaagaggatctttagcgttcatttttccgacgaacgcacgcggaacacgcaatttaaacttttcagaagccagaatcgcccctgataatagctgatcagtggataactcgagcaggttcaacaactctaaaggatcggtaataaggtcactgagttgtgattgccagttttgctcttggtgtaaatagtttatcatgcgacacgattaagataatgcaacagcgcattatatcgcatagttgacttgttaagtttggagtgtgccagtcatggccaattattctacaaatgatttcaagccaggccttaaggtcatgcttgatagtaacccatgttcaatcatggaaaacgaatacgtaaaaccgggtaaaggccaagcgttcaaccgtgtaaaattacgtaaccttaaaactggtaaagttttagaaaaaacttttaaatctggtgatactttagaagctgctgacatcgtagaagtagaaatgaactacctatacaacgatggcgaaatgtggcacttcatggacccagaaagcttcgaacaaattgcagctgacaaaactgcaatgggtgatgctgctaaatggttaaaagacgactcaaatgaaacatgtacaatcatgttattcaacggcgttcctttaaacgtaaatgcacctaacttcgttgtattgaaagttgttgaaactgatccgggcgtacgtggtgatacttctggcggtggcggtaagccagctaagcttgaaacaggtgcggttgttcgtgttccgttatttgttcagcaagaagaaagcgttcgtgtagatactcgtactggtgagtatttagagcgtgcataatagttaaaaaataaactattatcgaagggatgatgtcaatcatccctttttttatgcgaaagtataagaggaaaaagaacaaaggaggagtagagtcacaaggattgagcagagaacagtacataacaatataaaactgctgtaattatttattgagaggttaagaatggacacaatgcaagcgaaatctacgcttccctccaaattggtctggagcctagtagcaattataggtgctatttctttcgggatgctggcgctaagtcgtggtgaacatgttaatgcagtatggttggtactggcagctgcatgtgtgtatagcatcgcatatcgattttatagtctatttattgcaactaaagtatttgaattaaacccgagacggttaactcctgcacatcgtttagccgatggcttagactatgtgccaacaaataagtatgtactgtttggacaccactttgccgcgattgccggcgcagggccattagtcgggccgattttggctgcacaaatgggctttttaccgggcaccatctggttattggttggtgtggttctggcgggtgcggtacaagactttctagttttatttatatcaacacgccgtgatggccgttcactgggtgaaatggcaaagcaggagcttggtccttttgccggtattgtggtcatgttgggcgcacttggggtaatgattattatccttgcggtattggctttagtggttgtgaaagcacttgcacatagtccgtggggtgtctttagtattgcagccactattccaattgcattgttcatgggcgtttacatgcgctttattcgtccgggacgcattgcggaagtttcaattattggcttcgttttaatgatgctggcaattgtgtatggtggacatgttgccgcagatccatattggggtgagttcttcactttaactggaacacagctcacttggtgtctcatcatttatggttttatcgcatcggtactaccagtttggttgttattagcaccacgtgattatttatctactttccttaaaatcggggttattcttggtttggcagtcggtattgtgattgcattgcctgaccttaaaatgcctgctgttacccattttattgatggtacaggtccggttttctcaggtagcttattcccgttcttatttattaccattgcctgtggtgccatttcaggtttccatgcgctggtatcgagtggcacgacaccaaaacttgttgataatgaagtcaatatccgcatgatcggttacggcggtatgcttatggagtcttttgtcgggatcatggcgatgatctgtgcgacagtattagacccaggtgtgtactttgcgattaatgcgccagcagcagtgctcggcacaaccgtagaatctgcagcggaagctgtacgtaatctaggctttgttgttacgcctgaaatgttgacagttttagctcaagaagtgggtgaaagctcaatcctttcacgtacaggtggtgcgcctacctttgctattggtatggctcatatcatttctgaaatctttaacagccgtgccatgatggcattctggtatcactttgcgattttatttgaagcattgttcattttaactgcggtagatgcaggaacacgtgcttgtcgttttatggtgcaagacatggttggtattgttattccggcggttaaatcttcaggttcattctttggtaacttgttaggtacagccgttgcggtaggtggatggggcttcttcgtctatcaaggtgtgattgacccacttggcggcgtcaactcattatggcctctatttggtgtgggtaaccaaatgctggcttcgatggcactcattttaggtaccgtgattctgttcaaaatgaaaaaagagaagtatgtgtgggtgacgatcattccaaccattttcttgttcattacctgtatgacagcagggtggcagaagattttccacgaaaacccgaaaatcggtttcttagctcaagcacataagttctccgatgcgattgctcgcggtgaaattcttaagcctgcaaaaaccattgccgaaatgcaaactattgtgatgtcgaaccagattaatgctgcactttgtggcttctttatgattgtatcgattgtcatgattattgcctcaattggtattgttcgccgtgctttagcaagtccaacaccgactgtaaatgaagcgcctgcggtatataccgatcctgaagtggttaccactcgaggagaataaagatgaattttaaatttgcaaaaaatggtactgttattattgcgaaaatcatcaaaatgaccgtgctttcgcaaaaagagatattgctctctccaaagaactggtcacgtatcgcaaccttatggcagcgtttacagcaaagcttccgactcatggttggtgtgccggactatcaaacgtatctggagcatatgaaagcccatcatccagatttaacgcctatggatgcacaaactttctatcgacattgtgttgatgcaagatacccatctgcaggtggtaatttgaagaagtgcccttgttaagttgaccttgatatttggctaaataaagacggtatgtggttgaaccatgtaccgttttactttttgggaaatgaaaaagagtttgctcaaagtctgctcatttgtatttttttcactggtaaatcacttgttttgcttttgaaaaatgaatatgatgctttccatcttaggcgtatagctcagttggttagagcgctacgttgacatcgtagaggtctccagttcgagtctggatatgcctaccaagatttaaagtcctataaactcgaatcgctttatatgacttaaaaaagccctaaactataatggtttagggctttttttattactttgtataaacttataaaatcattaaatgcatattgcaagaaaggtgttaaaggtgcctagaattaaagagtgtattttgaatagcgaatagagataatacagtgaaccgatgagattgataggatagttgaaaatggccaaaaactggatgttcaaaggttttcttggagatgctacaccggatgatgaaatacgtgcttgtataaatcaaggcaagtttatgatcgaaattgcagaaaaaataaaaaataatgagttgttaactgatagggaaagggagtgggctgtaggtattgtgaaggctagaggtaaggaccaaataataaatccaacaaaatatatttctaaagaagagagtggagctcctccagatcctaggagatatgaagctgttctaagatattattgctatctaaaaattctaaaggtccaaagaagagcgattgaattagtttgtcattcctatgaagatataacatcagataatttaaaaagttggataaagcaagaacgagaagctggacagccaattaaaaggcaaacagacgatatgattattaataattcagaaagcataatagttagttatgaaaaaattaaagggaaaaagtaaaaaaagtttttccctattttctaaggctaccatgtgaataattaagtacatccctgttaatcatgaaaggatgtatctagatgtctaataaaattaatcaaaccagaaaaatcacttcaggtttagtaaagtcacattataaaacgctgttagacgcgctaaatttaattttgaatatcattcgtcttttgcttgaaatcatcaatattttatttctatagatctaaaactagtgcgcgacacgattagacgtattacttggctatatatattcatatataaactattttggcttatattcaaagggctaagtctaggttagtacccgaaagtctgacacccaatcagattgacttaatcatttttggggatgctttgggagcattgatatatgtcaaagatgcgagaattacagagtagagcaggaaacccggacctaagtcattggaagaataataagctattttcaatcgctgaagcagcattattaacatgtgggattgacccattagatcataatcataattttgaaaataatttagttgcagatttacagtttaaaaatgttgtaaattggagacatgctattttgcttattagagcatttaaagaagggatttgcacacatgagataaaatcaccatgtgtcctattgaatagggaggattatcatggtaacggatatacggaatcaaaagagcaatcagctttaggcataagtgatattggagatatatgtatttttggaacaagaatacatcgagataatttacatatatggcttaattataatgactattttgagcctattcagtcacatactatcagtgctcaaaactctacatatccgtcacatgagccaatacaacttaatagcattgtctcactaccagcacctatttatagaactcccgcattagatgctgtacaaggggttgttaataaattttgggttagttatgaccctgatggcaatcaaccaccaccaaaacaaatccaagttacggagtggattaaagctaactacccagatattcaggctgcagatatttgtaaatatatagataaaatttgccgtcaccccgaagcaaaaaaaggcgggaacactaaagtaaatcaacaaattaaaatcaaaggggttactacaaaataacaataaaaatcatattgttattttggggtcatagcactatttaaagagtgctgttatccctttggtacttcattaccccaatatatttttgatctccttactccatacaaacacaactgtatggagctaaataaatgcaacctattcgagttatttataaccaagcatatgaattattaagtactaaacataatactttaggtcagcctaatttgaatgaaccgattttctctaaagaggagagagtggtcgtagatatttcaaatcctcatgctttacgccgtgctcttttggactatacagagcaagtaattcatcttgaaactcagaaccagtgtttagagcgaacgatcgacaccattactcaaacacctgcaggagtgaaatttcagcaagcatgcaagatcttaaatattaaaagacaagtattagctagctggctgcgacaaaatggttgggatcgtcatcttaataatatgcgtacttcaacatactatagtcaggcacgtgggtattgtgaaaccaaatatgaaaaggtgattcgggttcgtcctaacggtgaacagtatactttcactatgatagagttttttattcttcctaaggggatgacgattttagctaaagcttttggtaaggatacctaagataatgaactttatagttgcatggcagaaaagataaggcactgtgaatgagtgggaatcttttaaaagaggttctcacctttataaacccagatttaacaataactatctcattatttagccttacttttttaatgatctaatttaaaacaaatgtcattttgtgtgcttgactgctaaagagcagagcactatcctttgcctgctggccacattgccaggcagttttgacagactgctcatgaacttccgcatcagagttattctttctgaggtataactttgtgtggtgactactcgtccctttgccgtagcggtaggacgggagagggacaccttcgggtgtgctagtctgagttcatgctagtctgtcaaccttcttccgttctgccaccataattctataaatgtctggcagaactcccaataaaaaggagttggctttgcacatccattatttcttggcagcctttgccaaaagctataacgacacagcttaaaaatttaaagcagcttgatgacctttagggttttcaggctttaagtcattacagctcaaaaaacttgcattaacaataaaacttgagatgtgccaagcacagtcttacggctttgctatgccttttttctccccaaaaagtatctcgtttagaaacaacaagaatttataacggtaaaaatatgccacattcagatctctcatttcgtgctttaagtgtgcttcatacctctcgatatctttttaataaatatggctttcacaaagtcggggttgaccgaattattgaatcttcaaaaacgcctaaagccactttttataattattttcactcaaaagaacgcctcattgaaatgagtctcacttttcaaaaagatggccttaaacacgaggtgctttccattattaatgttcaaaaagatttaaccgtaattgaaaaatttcgcaaaatttattatttacatgccgacttagatggactttaccatttgccatttaaagctatttttgaaattgcgaaaacacatccaaaggcgtatcaggtagtcgttgaatatcgaaattggcttattaatgaaatctataatttgcttttaaccaccaatgccaatgctgcaaaacaagatgcacatatgttcttatttgtgattgatggggcgatggttcaacttttagaccccaataagcaagatgaaagggagaggttacttgagtattttttgctggggtttatttaagccaaataaaaagtttaaagaaataagaattatttatttctatttaagtaccaccgtttcataaagagtttagcttttttcaatttttatatcgtaaaactacgtaaaacaaaaactaatttttgttgaacggtggttatctttaatttctttgaaaaactagatatagaaaggctttgactgaatttttaagccttgagtttgtccaactacgtcaaacaaaagtttagagttgaaggggaataattttgttttacaatcctagaaaggagaagtggttctaaaccttgagatataagcatttaaatgttttctttattgttgtgttcagagaaaaattaatttttatatgaaatcattactttactggttaataagattacgctcgggggagagagtaatcttataaaaaagaatcacaatataaggattttaattaagaatcctgtaacaatcctatggtttttgctgcttctaaagctatccaaaaccgtgtaatacctaagcttgttgtgggctttatgccagttaattcttctataactttcaatctatagactagtgtctgccgatgaatatctaatttagaagcggttaccttccaattgccatcatattttaaaaatacagctagggttttgagcaatggtagggagttagtttgttcatattctagaatacggccaaaataatgaccaacaacagctcttgcttctgcaacagttttaggacctaaggctagttctagatctaggtggttgtagtgaattaggtcggtttggctttctttgattcttcctaaagctaaacatgactgaaaaatactttctttgaaaccaagcattgctgtaattggactacttatacctatttttgttccttttccaaaataattaataagcgcatttaataaattactatcgtcaggaagtactgcaaatattctattttcatcacgagaaaataatggataaattttataaaattcaggtatatggtgaatgtctgtgtattggcgagatcctttgtttgatggatcaatggctatagtgactaatttacctagtaagccacgtctttctaacataatttttgcagcgccaaattcaatttccccatttaacaaatcatcgaataaagcctcaccttcttctcgaattccgtcacggtctatcatttcacgttctagctcaatactaagtaagccagctaatatgcggggtaaaaatgtctcatcaaaaaaacgtgactctttattaataatatttagagtagtttgggttctacccggtattttcacactatagggaacattatctttttgtaccggagtactaaaattaaaaataggggtgagtgtttcattatctaagatttgtaaatttaaagataacttttgcccgataatctgtaatcgttcatctaattgtgaactttcccataacgcatcagtatagacttgaaatagcttatttcctgcgtcaaaacggtctctttgagcttgcaaaacgctctcaattaccaaacgggctaatcttaaaaactctaaatcaaaactagcccctaatattggaaatcctaaatcagttgcttcatctagcatctcttgagttatagaaggtgcaaaatctctaggggcaataacaagggcactagcttgagcttcagcgagctgacgtaaccattcaatctgttcaaagggttcagttggtaaaccaccaccagtggtcattacgagggtgccaggtgatatccaatgccaaggatctggtaaatctacagcatgagcccatttaactatacgtttacctcctgatctaccagacttaaaagttaggcctaaattattgtttttcaccaattcatcaatggtaatcataagcatcctgcttttttcatcatacatttgtataaaagatagcagtttttatgcttatcttaccaatagaatcgtgtttgacatgggcttaacatcctcaatcaatactaaaaatgtttgaggaataataaatgaatgaagcacttagggatgagctcatcaaattaccaaatattccatattggtatgaaagaactgatgaaagaccatcgttaaatactgagattgatgctgatgtagtcattatcggagctggttacacaggcttgtggactgcgtattacttacttaaaacgtcaccttctcttagagttgtgattctagagcgtgaatatgccggatttggagcatcaggtcgtaatggaggttgggcttctgccatatttccaatttcattatctaaagtagcaaaaaattcatctcatcaaagtgcgctatttttacagcaagtaatgaatgagacagtagatgaaattggtcaaattcttcaattggaaggtattgatgccaattattctaaagatggctttttatccatagctcgaacacaggctcaactacagcgtgcaaaatcttcagttaaggcttcgaaagattttggtctacctgatcaatggtattttcttgatgccaaagctacaaaatcaaagattaatgtagctaatgcattgggtgcaatttatacaccgcattgcgctgtaattcatccaggtaagcttgttagaggattggctaaaactgtagaaaaattaggagctaaaatttatgagaaaagtgctgtaacgaaaataaactcgggccaagttacgaccttaaatggaaaagttaaagcccctattattgtaaaggctacagaaagttattcatgtcaattagatggatacaaacgttcaattattcctttgtattcattagtgctagccacagaaccaattcctgtatctgtaagaaatgatcttaagctaaaccataggttagcttttaatgatatgaggcatttgcgtgtatatgcgcaaatgactgctgatgggagattgatttttggtgggcgcggtgctccttatcattatggttcaacaatttcacccgagtttgatctagttgataacgttcatgaaagtatccgtagcactattaatgattttttcccaacgttaagaagtttaaaaataactcatcgatggggtggagcacttggcgtcgcccgtgattggtcaccatctgtaggttttgatccgaatactggcattgcttggggtggtcattatgtaggtgatggtgtcgcgatgagtaacctttcgggacgaattctcaaaaatttaattctaaatattcaagaaccaattaataagctaccaatcgtaaatcatgcttctcctttatgggaacctgagcctttacgttggatgggaattaattttggtttatctgcaacggcgttcgcagataaagaagaaaacatgactaatcgtccttctactgttgcatctgcactagaagcattgactggcgctcattaattttaaaggagtaaatacatgacaactatgactattgttaagcgcgatgaaattgaaaacggcaatttacctgctgcaggtttgcgtgctggcgctgatagtggaaaccctcagttaggagttcaaactcttgcacctaatgctcaagggaatttagggatttgggagtgtcaaccaggagggtggcctgttatcgacagaaaggatactgagttttgctacatcatatctggtaaagcaactctaactgatgacaagacaggtgaggctatttctgtaagtgaaggcgatttgataattttgcctgttggctggacaggtcgttgggatgtaactgaaacagttcgaaaaatattcacaatttattaattcaatcatttccttaaggaaaagtaaggaatatatctaaagttaaggagaatcaaatgagccagatcgttggacattttatcaatggcgaagtagttgtagatgaaagtaatactcaaccagtattcaacccatcaacaggtgagatcagtaaacaagtaagtttaggtggagctaaaacaattgatgaagcagtcgcttcagctaaagcagcgtttccatcttggagtaaaacacctccactaaaacgtgctcgcatcatgtttaaatttaaagagttattagaacaaaatactgctgaaatttgccgtttaattggtgaagagcatggaaaaattattcatgatgcagcaggcgagttacaacgtggtattgagaatgtcgaatatgcatgtggcgcacctgagttattgaaaggtgagcatagtcgtaatgtcggccctaatattgattcttggagtgagtttcatcccctaggtgtagtggctggtattacaccattcaactttcctgtaatggtgccgttatggatgttcccaatggcaattgtatgtggaaacacttttgtcctaaaaccttctgagcgggatcctagcgcgactttatatattgctcagttgttaaaagaagctggtttacctgatggtgtacttaacgtagtaaatggtggcaaagaagctgttgacgctattttggttaataaagacattcaggcagtaagttttgttggttctactccaattgctgaatatatctacagaactgctacagccaatggtaaacgttgtcaagcgcttggtggtgcgaaaaaccacgcaattgttctcccggatgcagatttagacaatgtagtgaattccttactaggagctgcttttggttcttctggtgagagatgtatggctctatctgtcgcagttgctgttggtgatgaaattgctgacagaatgattgcagctttaaaagaggcaatggcaaatttaaaagttggtattcattcagataaacaaaatgatttcggacctgtaattactgcagaacataaaactaaagttattggacatatcaaaagtgcagaacagcaaggagctactatttgtgtagatggctcaaatctcgtccatgcagattatgaaaatggtttttatgtcggggctacattgatcgatggtgttaccaaagacatgagtagttatcaggcagagattttcggtcctgtactgcaggttatgcgtgttaagacaatgcaggaagcaatggatctaatcaatgaacatgagtatgggaatggtacctgtatttatactagagatggggaagctgctcgttattttgcagataacatacaagttggtatggttggtattaatattccactgcctgtaccagtagcttatcaaagtttcggtggttggaagcgttcattatttggtgatttatttatgtatggtccagatggcgtacgtttcttcactcgccgtaagactatcactcagcgttggccaactgcacaaatccgagagggtgctcaattttcaatgcctaccttatagtttgagtaataataaaaagatagcttaatggcttaaacctcaaggggtttaagccatttttcttaaattaaataaacattttctactttcccattattgagagaattctaaactagagctatatagctctttcctgtaaacggtaatggataaaatatcgtaactcttatgaggtcgttgcttattatgcaaacgctataacaatactatttctctaacctatggtaagggttttcaaataaacaagtattgaaaaataccttcctgaatgaatcatagaatcatttaataaaagcattttttgtagctggcttaattatatgtactaattctttttatcttggcacaactctagcaatttggctgagtgcaactcaggattattattaatattaagctaccttggaaaggtcacattactgcttaagtagttctagtagtccttaattacacgttcaaccagcaaaaaagtatctatttcaaggttagtattcatgaatacttttatcgataatattcagaactcagaagcaattatcacaatatagactgtcatccatagcatctaaagcctactgatagttttccattacagctacttgtaccagtcgctttgataattctcgcttctagaggttaaacaaatttaagtccattagacaatacaccagatagacctgcttatgatttcagtcataaccatgacgatgaatactactaaaacatttccacaatagtgattgaggagattgtttaagtacatttgaatagcttacttaggggaaggagacagttgcggtcataagtttttatatctaagtatagtgttaattattgatttacaaattaaaatctcggtattgttataccgagatttattaaattaagtatagaaggtaattacgattatttagtatgtcttaagggattaacttgtgggacatgtgatgccttattagggctaacaattttcatagcgccgtatgcaattacaataacaaagattgcaattaaggactgtaataagctaagtcgtgtagctggattgatccccatactaactaaaacagcgacgatgcagagagttacaaataacggtaaccaagggtgcaaccacatcttaaaggttagagttccttcctgtacccattttttacgtaactttaactgtgataagcaaatcatcaaatagataaataagaatagagcaccagaggagtcaagtaaaaattggaatgcagtgtctggccacaatgccgcaattacaacacatccatacccgaccaaagtagaggtgagtacaccccaaactggtacaccacgcttattttttctagctaaccaacttggagcttcattatttgaacttaatacatgcagtaaacgagatgcagtgtataaacctgcgttcagtacagataatacagcaacaagaattactactgtcagcattgtaccagcaccaggaataccaattttttcaagtgttgctacgaaaggtgatttccctggaattatattagtccaaggttgtgcaacaacaatgaacagtgtcgataaaacgaaaaagactaagatccgcgccattacagtatttacggcacgacgaatgttttgtgaaggattatcggattcagcagcagcgatagtagcaacttctactccactcattgagaaaattactgaaactacaccagagaatagcgctaatgtgccatggggcaagaaaccgccatgctgagttaaattagaaaaagaggctgttgaatttggccatactttaaatacatatgcaccaacgataaccaagaatacaacaatagctgctactttaatgcccgcaaaccaatattctgcttcaccaaaagaacttactgataataagttgagggaggtcatcaagattagcaggccaagtgagataacccaaacaggaatatctggtaaccactgattaataatttgaccaccaacgacagcttcaaagccaacgacaactacccagaaataccaataaagccatccagttgaaaagcctgcgagattgccgaaagctaatctagagaaatctacaaatgagccagtggaagggcgagctgccgccatttctcctagcattctcataattaaacctaccataattcctgtaatagcgtagcagatgaaggctgctggacctgctgcagctattactgaactggaaccgacaaataagccagcaccaatcacaccacctaaagctaacatgctaatgtggcgggttttgagtgtagatttcagacgtggatcatgttccgtatgaataggcatcttttacttcctctatgattatagttttaactccatttgagggaatataagcattactgcaacagattgcctatatgtaaaaaagatgaatttatatggtccatttgtataaatgtatgaaaggttttcttatagataatttaagtaataaaagtaaaatgtataaagagtaacttgttgatagtaaatagttagtaattttaataaataattctgcttcgacgagccacttattgtaacttattcttaatctaaaaatttaaacatttgagcgacatgtttagcaatagctccaatagctttactaccctgactatattcaaaaatatccaaaaaattagaaaaaagaaaagaattttgttttacgagctaactttagagtgaacttaaggctttgagggctagctgtttaagtgcttttaaattctttttttaaactatataaaataaaaaacgcgtagttaccttttttctatttatcattattctcaattaattagattcaaatgagaaaaactcatggattgaatacttttactcactttttattaaattatatttatgagattttagggctttcctgagaaatggatcataattgaataaatttaaaccatttataacgagaatatctggtttattcgctattagtatgttcaaaagacaattttcatattaaatagcggaataaaagaactcgagttggaaaagagtttttaggaaatgggacaaattaggagtgtccatgaaaattaagccattgccgccaatgaacagcttaattgtattcgaggcagccgcacgccacctcagttttacaaaagctgcaaatgaattgaatgttactcaaggcgctatcagtcgacaaattcgacagctcgaagaatacctaggtaaggaattattccttagagctaatcgaaatatttccctaactcctaccggattgcaatattatcaaacgatttatagtgctttattagatgttgctcaagctactgctgaaattaagaaatggcaaggagagcatcaaataactgtggctacgacaaatgctatggctgctctttggttactaccgaaagtagctgcttttcaacagaataatgaaggcgttgatttaagaattttaacgacagacaatatttcagatttgcacaaaatggacttcgatctggcattattttattgccgtgtccctccagcaggaatgagagttactactttatttcctgaagaggtttttcctgtttgtagtccaaattatcttgctcagtttaaggaagatagttctccagaagaaatttttggcaaagctttactatacttagatgacgctcaaaaggattggattacatgggcagagtggtttgaagctgtaaactatcctattgtaaaaccgaaaaatagggtgaatatcaataactatccaatgcttttacaagccgcaattaatggtcagggagtagctttggcatggggttcactcgtagacgattatttacaaagtggtgctttagttagacctgttgaaactgttcttcgtactcaagcaaatttcagtatgctagaaccagcagataggggagttattccttctagtgttaagcatttccgtagttggttattagatcaactaccaggacaagtgggacaaaaaggcttaagttaattaactaaagagtggtatagagtacttgaattaccgatctttaatatacttattgtgattaacacctaaaaattattaattctttcttagaaaaattaataatagaaagagagtaatttttaattactctctttctattaaatagaatattcaagtagctttaatattctattttacatctggatgcttcggtacgatattaatggttgagatatcttcttgatgaagagctttaaataatgttacacagataattgttaacaggataaccatagggaatccaaatagaacaattgctgtttgaattgtttttaaacctcctacatataataaccctgcactaattaaagtaataaatacactccaaattaaacgtatacgaataggggtatccttatctgatcttgtatctaaaaagcaaagtacatgtgtcccagagtcttgcgaggtaacaagataagtaataagtaatatacaagttgtaatgcttaatagtgtccctaatagtccgccatcaattgcatcaaaaagagcaaatacagctaatgtattatcttttttcacagtttggacaatagggcctccttcgaaaactgtagtagagggagttatttctttgctagaagaaacttctattttttttgatgattctgaagtaggttctgcagtttttattagagcagcttgttgtttttcaaaactatgacgagaatcttgctcaattttaagggcagaaccaccaaaaacagccatccatagaaaagtgatgagagatggtacgatgagtacgccaccaataagttgtcggaaagtacgaccacgtgatatttttgcaatgaacattcctacaaaaggtacccatgttgcccaccatacccaatagaatgctgtccaccagttctgccattctgtatctttctgggtatcactccacaaactcattccaataaagttttgtgtataattcccaataccttctaaataagtattagtgatgtaacgtgctggaccaatacacattaaaataattactaaaataattgatagaataatattcaattcagacaatcttcgcataccagtaccaatgccacgaactacagaaaatgtagcgatacttgataaacaaaataaaattataaattgtgtagtagttccaatatttatgccaaaaaccttatgaagacctgcattaatctgtaaaactccaatggcaagcgcttgagaaattccaaatgttgtaatcacgataacaagaatgtcaacaaaatgcccgattggtccataaatcttattaccaattaaaggatataaagctgaacgtaaggaaaagggtagatctttgcgatatgaaaaatatccgatcgctaaggcagcaatacagtacagtgcccaagcatgtaatccccaatggaaaaaggtaagttggatagccatacttgctgcttcatcagttaacccttttgtaaatggattagtcgtataatgattaatgggttcagcaacaccccaaaaaacaagccctacacccatagcacatgaaaataacatggaaatccaagcaaagaagctatattctggtttatcgtcatctttaccaaatttaagtaaaccatatcggctacccatgagataaagtaagaaaaacacaaaacctgtagtacttgctagaataaaccatttcatattttccagaatgatcccagaaatatatgcaaaaatttttcctgcttgatctgaatagattgcgcaaaataaaataaaaataagaaccaatacttttgaaataatagagacgactgtgttagccccaacaacatctgtggcacgcatatatcctccttggatattaattattaactaacttccctgtgtgatttataagataatcagttagacgttacttctgatttattagattagttaagagtaatattttatagatactctctgtctatttaaaaatataaaaatagtctttagatttcaaaggagttattagcatgagttaatgagaaaatctcatgctataaaataatgaaatatgactttaaactttaataaaaaaagagattactaaaatctcttttttattaccttacttttcaataattacttgaagtgaacttttttcagggggactttcctctaatgaatcattcttaggccgtgcatgttctggtaataacatacatgcttgaggttctctacgtaaatttttaaataaagtaacactcataattgccaggaagatagctatgggaaagccagcaataatagacgcagattgaatggcttttaaacccccagcataaagtaatacgccagccagaatggcaataagtgagccccagacgatccgaattttaattggtgtttccgtagctccttctgcgtccatataacataatacatgtgtaccacaatcggttgatgtaataaggaatgtcgccagtaataagcaggtaatgatactaagagctttaccgagtgtaccactatcaatattatcaaacattgtaaaaagcgcacgagtattatcagcttgagtcgcttttactattggcccacctgtaaatggttctggagctggctcaccagctttaactaaagcagcagcatgtttttcataagcatgacgagcatcttgttctacttttagagctgatcctcctactacagacatccatatagctgttacaagtgtaggaacaataagtacgcctgcaataagttctcgaatggtacgtccacgagaaatacgagcaataaacatacctacaaaaggcccccatgtcatccaccatggccagtagaaagctgtccaccaattttgccagccagaatctttttgagcatcactccataagctcatgcttataagattttgtgtatagttacctgtagcctcaaataaggtattaaataaataacgagtaggtccaataataagtaaaatagctatcaatagaatagctaaaatcatattaagctcagatagtctttgcattcctctattaatacccatgactactgaaatagttgctattccacataaaatagtcagcatgataaattgtaagcttaaactattctcaaaaccaaaaacttgattaagtccagaattaatttgaagtacgctcatgctaagggattgagcaaccccaaaagctgtaataacaattgttaaaatatcaactgtatggccaataggtccgtaaatgcggtttccgataattggatataaaattgagcgtaaactaaatggaagacctttacgataagagaaataagcaagagctaaagcggtgatacaaaatatagcccatggatgcaaaccccaatggaaaaaagtcagttgcatagccatactagcggactcatcacttaaccctggtgtaaaagggttgctagcgtagtgccacataggttcagctgccgaccaaaatactagtccgacccccatgccacctgaaaacaacatagaaatccagccagtaaaggtaaactctggtttttcattatcttttccaagccgtatgtgagcgaaacgacctatcattaaataaaataaaaaacctaaaatagctgttaataaaccaaggtaaaaccatttaacattttgaagtaaaatgccagaaaccatttcaaaggctttacctgcttgttccgcttgtaagacacagaataaaacaaaagagataactaatattttagaagcgacagtcactgtcggattaagtcctttaaagactcctgatgtagctcgcatgactcctccttggattgcgcacaggcagctaatagttttagctgtatctggaagcccaacagattagagaagtggttaaagatttttcaatcgacttattctcactaaggaatgacaaaaagtcatgcttagcagtttctaaaaaattattaagcattttaagaatttttaatcattacaaaaactcattgatgccgcgcaaaaaagtcgtttgtcgactaatgcaatatttaacacaatctcctaagaaacagcagagtgtgcaaatcatctcaacgcagggagttctgcgttagttttaaatatatggagatcatcagatgaatagtcgagttagccagcaattaattacggttcagcaagtcgataatgttttgaaccctattactgaatcaaatggtatgccaaatttagcatataccagtaatgaatattttaattttgaacgtgacaatattttaagtaaaacttgggtatgtgttggttttgcttcagatttacctaaaaagagctatgtgaagcctgttaattttatgggcatgccattggtaatgatgcgcaacaaagaaggggaactacatgttttccataatgtttgtagccatcgcggtatgattctagtgcaacaagaaggcactattgagggtgtgattcgttgccagtaccactcttggagttacgacttaaacggtaacttaaaaggtactccacatgttggtggaattaaccagcataaagatgagcgttttaaatgtgaaaagcatggcttaaaagctctccgttcagcagtttggatggatatggttttcgtaaatatttctggtgatgctcctacttttgaagagcatattgcgccactagttgaacgttggaagccattcttgggcgaaaacgggttagagcttattcgtagcagtaaagtaggttcaacttttgagttacctgtaaaaagtaactggaaacttacagttgaaaactattgcgaagcttatcacttgccatgggtacatccagcattaaatacgtattcaaaacttgaagatcattacaacattatgttcgaagatcgctttgctggtcagggcagttataaatataacttgtcagctactgcgggtacgcatttaccaaaattcccaagctggccagaagatcaattgcgtcatgcggaatatgtagctgtgttcccgaacgtattgttaggtattcaagctgatcatgcatttgcaatgatgattgatccaattgctccagaacaaacaattgaaaaattacgcctctattacgttggtgatgagtcacttgaccctaaatatgatgcatgccgtgaagcaactttagaatcatggaaagtcgtatttgctgaagatgtgtttgcagtagaaaccatgcaaaaaggtcgtcattcacctggctttggtggtggagttttctctccagagatggatttaccgactcacttcttccaaaaatggttggcgactcaagctaaaaaagctttggaggcataatatgcaacactacctcaactacgttgatggccaatggcgagatgcttctcgccaattggaagttatcaatccagcaactgacaaagcttttgcgacagtggctcgtgcaagtattgaagatgcagatgctgcaatggctgcagcacgtcgatgtgtgaatagcggagctttaacagatgtgcgtcctgcgaagcgcactgcatggatgttaaaagctgcagaagcgattcgtgaaattgctgaagagggtgcattaatcctatgtcgtgaaaatggcaaaaatattgatactgcacgtgaagagttcgatgaagccgctcgctattttgaatactacgcaggtatggcagataaagttgaaggtatctcggtacctttaggtaaagattatgtcgacttcacctcatatattccaatgggtgtatcggttcaaatcgtaccttggaactttcctgtttcgatctgtgcacgttcattagcacctgctttagcggctggtaatgcggttgtaattaagtcacctgaagtttcacctttaggaatggttttactcatcaaagctattgagaaagctggttttccccaaggtgcagtgaacttactttgtggtaaaggttcagaagttggtactcatcttgttaagcatcaagatacgaatcaaatcgtatttaccggttcagtaccaacaggacaacgcattttgaaagatgcggctgaacgtgcaacaccttcagttatggagttaggtggtaagtcagctgcaattgcttttgctgatgttgatcttgagcaattactgcgtagcgttaaattaggaattttctataactctggccaagtttgctcagcgatgtctcgcttattagtgcaccgcagtcgctatgaagaagttaaagcagctgttgtgaatcttgctgagagcctaactgtaggtattggcgaaagtaatgccgaacttactccagttgtatctaaagatcagcaacaacaaattcttgccatgattgataaggcacgtgaagaaggtgccaatgttttaacaggcgggaaagcagcagatttagaaggttactttgtactacctactattatcgaagcaacagccgatatgtctattgctcaagaagaagtttttggacctgtaatggtgatcatgccattcgatgacgaagaccaggccgttgcaatcgcaaatggtacggactttggacttgttgcaggtgtatttggtgaaaatctgaatcaaacacttcgagtagcaaaccgacttattgctggccaagtctttattaacgaatggtttgctggtggtattgaaacaccatttggtggtgtgggcttatctggttttggtcgcgaaaaagggcaggaagccatctacagttatgttcaaactcgcaatatcggtatccgtttgaaacatagcgtgtaatttgtaagaaataagggaaatagacaagatgagaaagtggttatgtattgtctgtggctggatctatgatgaagctaaaggctggcctgctgatgggatagcaccagggacaaaatgggaagacatcccagatgactggatgtgtccagagtgtcaggtgggtaaagctgatttcgaaatgcttgatatcacagatattgaagaggacgaaatccctcaagtagcagccgctgcagttattgaaccagttgttattattggtagtggccatgctggctatcatgtagcttcgaatttacgtgcacaatctccagacttgtctattaccgtatttactgctgatgatggcgccttatatagcaaaccagctttatctaatgcactagcattaggtaaagacggagatagtctagttcgtgaatctgctcttagttgggagcaacgtttaaatatccgtgtttatccacatacgaaagtgactcatattgaccgcgccaataaaaagcttcaaaccactattggtgattactcttatgggaaattggtgatagcaactggtgcaacgccaattgttatacctattgaaggtgattcgtctgcaacattaagcgtaaatgatctggcagattaccgtcgtttccgtcagcaattggcagataaaaaacatgtcaccattcttggtgatggtctaatcggctgtgaatttgctaatgatttagctgcacatgggattaaagttactgtcgtcggacttggtaaatgggcaatggaacgtcttattccagaacctttaggtcatgctctacaaaatgcgcttagccagttaggagtagagtggaaattacaaaatagtatccgctctattcaatctgcaaatggttgttatcagttaacactacaagatggccaaataattgaaactgatttggtattaagtgcagtaggtttaagaccaaatattgctcttgctcaagaagcaggtctagagacagcacgtggtatctgtactggtctggatcatcgtagtagtgatccttcaatttttgctttaggtgactgtgcagaagtgaacggacaatgggcaccatatatcaatccaatcactcaagcactacctgctttagttaataatcttttaggtcaatcaactgacgcagatctgaaagcgaccccagttttagtaaaaaccccaattttgccactttctgtattgccagcaatggaaacaggtgagtggagagtggaagagcacgatggggagttggcggctggtttttacaatgagcaagataaattaataggctttgccttactcggtcgtcaattacaacaccatcgtactgaatggcttgagaaattaaattcgtgcccatccacagtttaagttaaaggaataacaaaatgattgctttaccaaatgatgataatacttgtgggtggtatgcagcattgcctccagccggtcctgctaaaaagttaataggtctacaaaaagctgactatgccattattggagcaggctttgcaggattggcagcagctcgaagattagctgaactcaaaccgcatgcccgtattattctagttgatgcacaacgtgtagctgaaggtgcttctggtcgtaactcagggtttgtaattgatttaccacataagtttgcattatcgcatcctgacccttctcataagcaaaagttattaagtctgaatcgttcagcaattgctcagttacaaggcctagtagagcgctataacattgattgtcaatggtctgcagctggtaaatatcaaggtgctgtaggtgagcgtggcgaagcacatctcaatcattttgagcatctaatgaaagatttaggtgaaccatatcgttgggttgaaaaagcagaacttaaaaaagttttaggtacagatttttatagtcgtgcgatttttactcctggttcatatttgatgcaaccagcagctttagtgcgtggtatgggtgaccacttaccagacaatgtggagttattagagcaatcaccaattcgtagtttgcaaaaaagtaataaccaatggctattacagggtgaccatgggtcaatcacaacaccgaaagtattgctggcaactagtatttttactcgtgaatttggttatttgaagaaccgtttattaccagttatgacctttgcgagctggacgcgtccattaactgaccaagagatgaaagtttatcagggtgagttagattgggggcttactccagctgatcatgctgggacaacgttaagaatgacagctgatcgccgtattctaatccgtaacacttataagcatgtcccaaaatacggtgcaaatgtaagtgatgataatcgtcgttggatacaagaagatcatcgcaaggcatttttagctcgttatccgaatttagctaatgttccatttacccatacatggggtggtgtttatgcgatttctcgtaatttcactaacttctttggggagttagaagaaggcgtttatgcgagtgcttgcgacaatggtgtaggagcagcatggggcacaatttcaggaacgttattggctgatctcgttgttggctcagattcccaagctttaaaagatattcagtatgtaactggtatgcctagtttaaatccaccagaaccgttcttaggtttaggtgttagaacacgtatcagatttgaaaaatggcgcagtcgtagtgaattgtaagcgggagaaatagatgaaagaagtaaagttagttgatagcgctcaacttaatttcaatttacgtggcgaaacaccagatggtacggcttatgttgcaagagcattaggagctgatgtttccccaaatatgggtattggttttgcacgttgggaaggggcagaggtaagttggaaattactttatgacgaagtcatttttgtaattgaaggctgttttgagcttactgctaacggtcaaaaatatgaagttcgtccaggacaaatgttgtggattcctgaaggaaccgagctaatttatggtggacatgcggtatttggttacgtagtacatccaggtaactggaaagagctgcacggaattgcataaaagaaacgacccatattgttcaggaaaaaataatgtgggtcattttattcttatgagaacgtagctttgaattagggctaatacaaattaacgaaaattttaaatttcaggagcttctcctgaacagggaagtgttgtctgaaaaaaataagcagaggacaggaaaggttttctgcaaatcttcatttaaacaaggatttgtaaatgagcaaggtctatttaacacttggatttgggttaatttcagttggaatggcgttacctgcttttgccggagtaacttttggagatcctaaaagtgatacgggtgctttaacaatttcaggtgctttacgtgggaattatcaagataaggattacggcgagtctgcatcagatcagaaaataaaatttgatgcagctattttaaggctaggttatgagtcacccgactggtttggaaaagtcgaatatcgttgttatcaatacgataaattctgtgatttctcgactctagtttatggctatgctggctaccatttaaacgcgacagatcatattactgtaggtgtgcaacccattcctttcggtccaggtcgtttttgggatagcagcttttatgctggtattaacaacacaatgggtttgcaagatgcttccaatttaggtgcgaactatcactttgaattaccgtctgctactaaagtagatttggcttattttgcaactgatggtggtaactaccacggaagtagtaaagactcagcacgttatacggctaatgttgttacctcatctgatccactcaaaacaaacctgaatgaaaaaaacatgtggatggcacgtgtcgatcaagatcttaagtttttaagtacagatgatctcaaagtatcggtggggggaagttattggtattcagacattgagaataaaaaaacttctgcagatggtacgagaaatacatgggcgctatttaaccgtattaactataaaaatctgaatgtcgtgcttactggagggcgacaatcgattagtaataaagatgcattaagtccagctagctcaactttcggttcttttgatggcgaatatgacattgcgaacaaaggatatttctatactgttgatacgagctatgtttttaagaatgttaaagattcgctcaatgttacgccgtatgttgtttttagtggttttaacaagaaagaaaatggatttgatgactctcagcgcaacattgttggagtggcgtgggactataaaaatatttctttatataccgaatatgtgatgagtaaaaacgatccgtttgttggcggcaatggtagttctcttgcagcaggtgatgatgggaagtggaacaaactcctcaatctaatgttgatttatagcttctaaaagtttgtacaggtttttcatttatcaattttcaggaagtttaaaagcttcctgaagccgtttaggaataataaaaatgtcttcaccatttattagtacatttattttatttttctcattacttaatccattcctcatgagtatctatatgattgggctaatccgtcatacagaaaccagagtatttaataaggctttgattcaaggaagcctcattgcatatgtggtatttcttttatttgcatggggtggtgaagcaatttttaatcggtacttaaatgtaaggtttgaatcatttctaatttttggtggcctgatttttctggtgattggatatcgctatgtatttcagggtgccgatactattggagaaatgcgaggagcacctgaacatttggctggcacagtagctatgccatttatgattggtcctggaacaattagtgcagctgtagttacaggcatgagtatgtctcttttagaggcggctatagtgatcgccttagtactatttgtgagctgtagtgttttgatagcaatgaaattttctcatgatcacttacgttatagccatgccaaatatattgatcgttattttgatattgtagggaggttagctgctttattaattggaacaatcgcagtcgacatgattgtaaatggtgttacacgtttgattgataaagtttgataagcgtaaacgtcacagccatatacgatggctgtgactaagaaattaggaagctaatttcgcttggttatgttgaacatggttttttcgaattgagtaccagcagattaacgatcctaaagtaaccgttaatgcaccgtaccaaaaattgattgttaaattggagttcaaaacaaaagctgagaatgccgatgagaaaattggagaaaaataagaaagcataattaaaacgggcatgttccctttgataataccaatattccaagctagataacccatagagaaaaaaacagcattaattaagacgaatatatagccattaataccttgaacatggggtaggtggaatccttgagtagagagagtaagaatccataaagctatagcagttaagataaaataaagtgatacagcattagttccattgctttgctttttggtataaatacaataaacggcccaaagaatagcagctaaaaaaatgagcaagtaactaatcggattttttgaaaagttatcaataaagtttagatttggatgatagttgataacaactatccctgcaaaacttacgatcactcctaatatggtcaataagtttactttttcttcttttaatactgccaacataataataattaaagttggccacatattaaaaataatattcatctcaatcgatttttctgatgaatttgctagagtaattgaaaaggcaaaacacaattcaaaaacaacaaaaagcaagctagataaaataagaaacttctttgaaaccttttttaaatcgggcaggccatatgttaaaaataaaataatagcactgatggtatatacataagtcactgtatagataggaccaaaactttctgtagaaagcctgagtaagccaactaaagtggaccaaagtaataaagctgaaacaccgattaaagttgagatttggcggctcatacgatagacccgattaaaaaattaatcataatttttaaataggtattttaatagttagtcgagcacgataaataatcatgagttaatgactttttatcatcattgaaaataaaaaatgaaaatatttaaaataaatttttataaaataattattatttttactttcttttaagtgtgatgagcattacaccaaaaatattaagaaaacaccctagccactggattgtatttaaatgctcatttaaaagaaagactgaaaaaagaatagtaacaattgggctaatagatgaaataatagctgattgtgttgcacctacatactctatactcaatattaataagagtgtgggtagaactgtaacaaataaacctaaacagattccgtaccaaataacttgtacaggtaaagagctaagtagttgtacaggatgactggttaccattagaaaatgtataagtgtgccaatacaagctgcagataaagatagtcccgttaagttccatgaaccaaattttttaattaatggtggggtaagtaagaggtagcaagcaaaagcaactgcactagcaaatactaagcttgctccaaaccagaagttatgttgatccggaagcgttttttgctcttggagcatcacaatgactgttcctccgtaacttaagacaagtgcaaatatcgtttttgaacttaatttttgcttgaggataaaactcgacgctaaaacggtcatagtgggatataaaaataaaataattcgctctagtgacgcggtaataaacatgagtccatagaaatcgagccagctagaaatgtaatagcctaacaagccaacagaaagtagatatagaaaatctattagcttgatattccgattttgatggcgacaaaaccaacagataactaaaaagaagggtagagcaattcccatacggatagccattaaggtaatggcatctaatgatggagtaaggctatatgcctgtttaataaaaattgctttactgctaaatagaaatgcagagataaatgcaaacaaggcaccaagttgaattaaagaaatattgagcttcatggaaccttgctgcatgaataaagagtatttttggagatgtctttaagcttctgaattttctttagaaactgagattttatagtaagcaacatcgtattcggctttcttgtaagcctcataagaagttttgctaataattactgcagattcccgacctctgcgagtaatttctacaggatgcccagcaacagcttgatccataatcatggtaagttgtgctctagcatttgaataattccactgtttcatatgtattctccctgactaaaacatcttcaagataggtgaaatgtacgcttcgcttcaatggatatattttcaagatatgatgagttttaatcatatattcaggcgatttctgctcttgatgagcaatttaaaataaagactcaaagcaaaatactctcttttttaagagaaagtattttgctttttattcagaaagtttgagttaatgaaaaatttcactcattgatttacccttggtttcaggcataaataggtaggtaattactgttgctattaagcacaccccagcagcgatccaaactgctaatgctgctccatgtgctgcaacaaacataggcatcaaaaacacacctatagcagcgcctatacgggacattgctgctgcaaaacctgtacctgaacaacttatttctgggcgtaacacttctccggggataactgaaatcatccctgcagtaatagcattagcaaatgcaaaaactaaaaaaccaatcagaatccatgtggggtgatttgcagctaaagccacaacgactaacgcaatagtacatacgaggattggaagaattgccattttacggcgcgacactctttcaattaacaatacagctgcaagtgttccaaatacagcaaatgtgttgaggaacaatcctcctttaataccgtcttgcaaacctaatttttctaaaatcattggaataaatacaccaattgcgaaataaggtgcagaagtaccaataaaatatatagaaactaaagtggtgcctttgatatttttacttttgaataaatcaaagaagcttgtcttttgtccaacatttgcatgcttctgatttaaaatatcgttcttgtcttcttcagtaaaatacttatgtgcaattctagaagcttcttctttacgtcctttactcatgagccagcgaggagattctggaataccactacgcattaataaaacgattaaagagggaattgcactaattcctaaaatcacattccaactcgcaatatgattttcaatcataataaaacttagggtatacgagacaagatatccaacaaaccaagaggtttcagtcaaaatcaataatttacctcttaggcgagctggagcaaattctgcaagcatcggccaaccgactgcatattcaattccaatcgcgacacccattaatagacgagctataaaaagcgtgtagggatcagatgcaaagaattgtccaattgagcatatgaagaatataaaaaggtcgatcatgaatagtggtttacgaccaaagcgatctgaaaaatatccaccaattggagcaccaaagaaaattccaatgagtgaggctgcaccaattaagccttgccatgtagttgataaatgcaaatcggctgtaatagagggcattaatgcacctaaataacctaaaacaaatccatcaataaacatcccgcctgccatgagccaagcgagttttgtcataaagcgacgtgctatttgatcttgggaaattaactgaggtggggaaaccacttgttgttgattcatgatacgctccttgtgtatcttccttttttgtacatatgtacttgctttagtttttatgggcgattgaggaatacttttgaatatagtgactcctcatacttcatccttctcgcgccatctttgttagtccttgagcgttattgttctattgagtaggtatatttaagacaatagaagggaataacactcattaaaaatgaatgtctaggtaactttgaagtcttaaaatttgtcttaaaacgtatatagaaatgactgttttaatttttaaaaacagtcataaatgtatagtttcttgagcttgccttatttaaatgaaaatcctgtttagtcaccccaaacagcgactggtgaacccaataaatcttcatcaacagtaataccaaggccaggtttgttagggaccatcacaccgccatcaacaatcggtgcatcaaattctgctgtgtgaatgcttaccatccctcgtgtatctaaaaggcaacgtaggtttctctcaggaatcgttgctccaagatgagcaattgctgcaaatggaatatctgaacctacagtttcttgaacacttagagaaagcccagctgcaagaccaatgtcacgatgtcggcgtgagtgagttaatcccccagctttggagatttttaaacctacaccatcaatgagatcttcagtaattgcatggattaaatcttcatcttgctggatcagttcatcaagagagaaagggacatcacaacgttgacgtaatgatttggtttcacgccatgttttacatggtgcttctaaaacaaagtcgagacctttagggagtaaacggaaaattcttaatgccatttctggtgtaaggccaccattcgcatccacaataaaaaattcacctggtttttgatcagccaaacttgctttaatacgttcagcatctaagactggaccaccttcgctatcgacagcaccaattttcactgagtgacctaaataacccagttcacgatgtttagctacattttcacgcattgcgtcaggggtgtcggcatgaatagaagaaattacaggtagtctacgaccagttgaaccacctaataattcacatacaggtaaatttaccgatttaccaaataggtcccaacacgctagatcaagtgctgatttggcatggttatgtccaacaagagcattatccatggtctcattaatacgatcgacttgacggggatctttacctaataagtgaggcgcaatttcagcaataccggcacgtgcacctaaagcgtgagatgcaatatatgttgaaccaaatggtgtactttctccccagccttctaacccgttatctgcaataatttttacgatggaagcatcgaagctacgatattcacggccacccgaaagatgatatacaccaccagagtaaggtagatcgatttgatagagctcaatacgcttaattttcatgaatatatccttgtctttaagactatttattcttggtgttactgatgacatccgtattgattagaaagaagcataagtaacaccattcacttaaatctgatctatacctcaactgatggaacagtcaaaacgagcttgcccagatgtttcttgctcagaaactcttcttgagctttagcgatttcattgaggggataagtcttagccactaatggacgaatttcatttttctcgatatatgaaatgaggttggtaaacacttcatcttcttggaatgtacagcccattaaagtcaaatcattcaaatacactgtacgtagatcgatctgcgaaataggtccagcgattgctccagcatttgcatagcgcccacctttacgtaagacttctaataaagaaggccattgtggtccaccaatcaaatcaataactacatcaatcgattctttacctaactctttaactaagtcagcattacggtcaattacacgatctgcaccacaagctaatacttcatcagctttagataatgagcaaagagcaataacttgagcaccacggcgttttgcaagctgtactgctgcagaacctacaccaccagatgcacctgtaattaatacagtttctgcacctaatccaattcggtgtagcatattttcagctgttgaataagagcagggaatagaagctaattcttcatctgtccaatctgaattgattttgtaagcttcggcagatttaactgtagcaaattgagcaaaaccgccgttacattcactaccaaaagtccagcactcataaggacgataatcaacataagcacgtaacatagtgcggacaatgactcgttcaccaatacgagatggatctacatttttaccgactgcaacgatttttccgcagcaatccgcaccttgaataaatgggaatttaagaggtgtacctgaccaagatgcatcatcatcgctaatactttcaagaccattagcaccacctgtatttgtagcttgttcatttgtcttcgagtaccaaccaatacgagtattaatatctgtattgtttacaccagctgcagaaacttgaattaaaacttcatcatctgctggggtaggaactgttacatcagtacgatattcaagctggtcaagaccaccgtgtccctttaatagcacagcatgcattttagtaggcagtaccatatgtttctcctagtgaagtagtgggtgggttgtaggttgtaataattgatgggctaacttactggctctttgaattgctgctttaccaccgattacaggagctaaggcaacggcaccttcaatgatgagcatcaaactttcagctctatctttaaaatgatcagatgaagttttagcaaattggcccattaaaaaatctagtgtgcgttgtttatgaataagcacggtctgcactatttcagtctctttatgacgatactcagctagagcacgtaaaaataaacatcctctgtcactttcttctgtgaaccagttttccaactcattaaaaacggctacccaatttggaatagagttttctttattctcaatgcattgctgtagctttctaaaaaagcgtaattctctttcctcaaggacttttaaaatcaattgttcctttgagtgaaagtgtcgataaagagttcgtggagttacctcagcttcacgaacaatctgatcaattccagttgcatgaaagccttgatagtcaaaaagtctctcggcagtattgagaatgtcttgggctttgctcatatagaaaggaggtatagtgaacgttatatttaaattaggtagtggttagcttattttcaaaggattaatttgcatgaatgcatgagaaaaagtcatggattgatagtgagttaaatttaaattaatgaaaactaaataaataataagaattttattttatatttaaggtacttgtatattaattttgaagtgcaagttaattaaaaacaaacattaattagctgacttttataatttttatattttataattataaatatggaatatatgaagttcttgcatatatttttttcaatctttttatagtgcggtttatttatgtcaaatatggaaattccctttagttcatcaatgattatccatacttcaagatatctttttgatcaacatggatttcataatgttggagtagaccgtatctctaaagagtcaaatgttagcaagatgactttttataaatacttcaaaagtaaagagaaactaattgagctgtgtcttgagtttcatcaggaaactttaatgcaacaagtaagttcaatcttaagtgcaaacttaaaaagccaaaatttagataagttaaaagaaatttattttttgcatgctgatttaaaaagtcactaccatttaatatttaaggctatattcgaaatacaaaaaatatatcctcaagctcatcgagtagttattaagtatagagaatggttaattaatataatactagaaatattattaaatattaaaagcaatgcttctattgaagaagcgagattacttatatatatcattgatagttctattatccagtcgcttataaatgatgagattgatcatagagaatatatatggagctatttctctagtaaaatttcactctaatagtaaatctgaatatgattgaatttttaatgaaaattaggaaagttctatcagtctttgtaagcccagaatcctgtaacctttaaacttttttaatggttacacctccaaaactttaccctataaaactattaccctaaccccacctttataaacccctcttaaacaataacttaatcattatttagccttacttttttaatgatctaaattaaagcaaatgtcattttgtgtgcttgactgcaataaatgtgaagcttatcctttgcctgctggccacattgccagtcggttttagcagaccgtgatgaaagatcgcatcagagttattccatctgagggatactcttatgtgtaaactcctagtctcctcccgtagcggtaggacgggagagggacacctacgggtgtgctggttatatctttcaccagtctgctaaccctttctcgttctgccaccataattttaatgctttggcagaactcccaataaaaaggagttggctttgcacatccattatttcttggcagcctttgccaaaagctataacgacaccacataaactttaaagcagtttgagggctattagcgctttcaggctttaaatcgtcacaacaaaaaacttagcaacaataaaacttgagatgtgccaagcacagtctttataggctttgctgtgcctttttttctcccaaaaaagtatctcatttacaaacaacaagaatttataacggtaaaactatgccaaatttagttctcccaacacgtgccttatacgtcgtaaataaagcaattgatctgtttcaccaccgggggttccaccttattggcgtcgacagaatagtgaaagaatcagagattacaaaagcgactttttataattattttcactctaaagaacgactcattgaaatttgcttgatggtgcaaaaagaaaagctccaagaacaagtagtcgcaatggttgagtatgatttaagtacttccgcaatcgataaactcaaaaagctttactttctacataccgatttagaagggccgtattacttattatttaaagccgtttttgaaattaaaaatagctatcccaacgcttatcaatccgcagtgcgctatagaacatggctaaaaaatgagatttatagccagcttagaacactaaaacccgatgtctcttttaccgatgccaaactatttttatatatggtggaaggcacaatcattcagcttttaagctctggtggggtaagcgagcgggagggtgtgtttgagtgttttttacgagggctaactacatgcaaatgaaaagtttagggttttgccagtagcggctaaatacgagtcataagaaagggggctgtgctgtatttatcaaaaaataacttgtttattcagcatggctcctttaaataatgaaagagaaaaacaacaatgatctctatagctgtatgagggaggacgttatttgaagttatttattgtgatatttattgccattttttcgagtattggaatcatttgcttaatcgcattactcagaaattcaaaaaattattcaccatcgggtgagcatgattattcagcttcaacacattcaccacaccaccatatttacgataacagtcaccatagttctcattcatcaaatgattgctcatcattttccgactcaggcggatgtgatgggggcggtagcagtgactaaaaagccctttcatataaaagggcttttaagcagtttaaggtaaatcaaaccagataaattggctgtcttcatttgcatgaatcacggcattatcttcaaagaccagagcatcacccgctttcacttcgtactcaccaatacgaacttcacctgaaattacatgaacgtaatttactcgttttgaagtctcaactggcagttcacgacctttttcaagtacagcagattttacctgtgcatcttggcgaatatgcattggtgcatttgcgtcagggcctgcaatcaaatgccattcgttcggttgattacgtgggtccaaactaatttgctgataatttggctcggcttcttttacatcaggaataatccagatttgtaataagtgcactggcgtatcggtgttattaatctcactatgagcaacacctgtaccggcactcataagttgccattcacctgctttaatctggccttcatttcccatggtgtcacggtgtgaaattgcaccatcaagtacacaggttaaaatttccatattgtcatgcgagtgagtgccgaaaccgttgtgggcatcgattcggtcatcattaatgactcgaagtgcacttacccccatatatttagggttataccagctaccaaacgaaaagctatgataagactctaaccagcctgctttaacatgaccacgatcttcactacgatgcaaataagcattcatgactcgatctcctcaattattatttatctcttgaggaatatgttaaacctgtggggtaaagctaaaaatagagtagatgcaacatattgttgcatttttaagatgattaagatttttataaatattcgttttaaattttagatataaaaaaagcctgtataaagcaggctttttaaaaagacattacatataaatgcctatctataaggctttaaaggaaattatagatagacattgagtttgattaagcagataaaaactccgcgtatttagaaatatcgacgttgccaccactaataataatgccgatacgtttgccttttaactcatgttttaaattacgggcagccgcaaatccaagacatcctgtcggttcaaccaccatcttcattctttcagcaaagaacttcatagcgttaatgagttcttcgtctgtgactgtcaaaatgtcatcaactttctgttgaataataggaaaggtcaatttgcctaaatattgagtttgggcgccatcggcaatggttggaggggtatcaatatgaacaatttcgccttttctaaaagacatttgcccatcatttcctagcgcaggttcaacgccatatattttgcagttcggagaaagctggcgagcagacagggcagaacctgccagtaaaccgccgccacctaaacatacaaacaggtaatctaaatcaccaacttcttcaaataactctttagcagccgtaccttgacctgcaatcacatgcggatggtcataagacggaattaatgtcagaccatttttttcagcaatctcttttccaatttttcccgatcttccgtataacggtcaaattcaacaatattgccgccgtattctcgcgttgctgccatttttgcagcaggcgcatctttaggcatgataatggttgcaggaataccaagaatttttgatgaaagcgcaatagcttgtgcatggtttcccgaagaaaaagcaactacacctgctttcttttgagtctcattaaattgtaaaagtgcattcatggcaccacgaaatttgaaagcgcctacacgctgaaaattctcacatttaaagaacacttctgcttcaaattcattgttgaccgtacgtgaagttaaaacaggggttttatttataaaatcttttatacgttcagcagcggctgcgacatcttcataatttggaagggttaaatttttcataattaaacctgattctattcaatgttttcggatgcaagatttcgtattgccaaggaaagcacaatctattgaccttgtttagataaaatatatatatttagataaaatgtctaatttattttctaatttgataacaaagagatataagattttgatttacattaagtttaaaattagataaaaagtctaaattactgtttgtgtacttcactctagggtttgaaacagtaattaagtcattaggagaaatacattgggcaatcgtgataagcatttactcactcaacttgatactatcgcgaaagggttaagtgaaacactagcgcctttttgtgaagtggttgtccatgacttaaccaatcctgagcatgccatactttcaatacacaataatttatctggccgaaaagttggagatccggcaactgagttggggctggcaagaatcatgtctccggagtttccaaaccttattacaaactatgctaaccagtttgcagatggtcgccctgcaaaaagcacctcgatcggcattaaagatgaagagggccagtacgtagccgctttatgtatgaatattgatttaaccttatttagagggatgcaaagcactttagagcatttcactaaaattgaaactgacagcattattgaaaacttggaaccgaatggcacggaagcaattcgaagatatatcgatcagtttgcttcaaaacatgccactacaccgcgtatgttaaaactcaatgagagaaagcaattaatacaagaactcaaaaataatggcttactagaaattaaaaaggcggtggaaacggttgcccaacatttaggtatatccagagccagtgcctatttgtatgtaaaagaaacttaatttgccaaatcgaggtcatcatattcgttcaaggtcttaccttgctgaatatgttcctgataatgttgagcgcgcagtttgtctaactctgaacttgatacgccatctctccagtagccagcaatgcgcacgtcatttttatttaagtgttgatcttctagaaaaaattgacgtaaggctcttgcttcgttgcgttcgcaagctgcccaaatcgtaatattttcataattttctagcgcaaatgctgcttttaaaagaagacctttttgtgccgtgtgatgttctttatggaacgaatgaattttgacatgctcaagttcgggtaattggctagcaatgtctttttcaaaactttcaatgaaaatatccgcacttatgccgagttcccattgcttaagtattgaatataacgcgggtacagccgtatcgtcggcaaacatgaccacatgctttttggctgtgaaattgggaatgaaatgggggcggggaccaataagcccgatttttgtacccacttgagccgaattaagccattccattgctgggcttaaatcttcatgtttaacaaaatcaatttcgatttgagcatttacagggttaaatgaacggaccgtatagacgcgtgaaatgggttgtccctctggcggattgttcacaattaaccgaattgccaaattgggagcttgccaaagctctggttgtaatgtgttgatttttccttgaattcttacaatagaaggatacggcgtctgaatcgagacaatagtcatctcaagctgttccatatcttgtaaatggtctttttcttttagtaagtcgccatattcttgtttcgatttttctgcaatttttgtcatatatataacccaagcttaatgattactatagagcgcgataattgatatagatgtgatctctctatggctacgataacgaagttagctcttaatgtaaataataatcattattaattgtgtgttttagacgatagagttagttctctaaacaattaaatcgaatagcaaaaattattttattattttgatatttatcattttttattaatggcttttaaaagaaagaaattgatatttctcttaatagtaattgtaaatgattatcatttatattattgtgctggggtatctattattcaaacaaacagcaatgaaaacgacatttttataactttgttttgaatattaggttgggtggtattgcataaagaatagggtgaggaccaagataaatgctaaaagatttgagtcaaaatttagggcaaatgaatgataaaaataacaatgtagaaaatttcttaaagcaaatttatgaaaatatttttgatcaaaattccaatcgaacagcactcatttttgaaaaccgtagcattagttatgctgaggtagggactcaggtcgccaaggttatgtatgcgctaaaaatgcaagacttggcaacagggtcggtggttgcaatttgtctgagaaaaagtcctgagcatatttataccgctttagcatgtgcgctcactggcatcatttggctacctgtagatatggattctccgccgtcgcgactgaactatttattgacgaatagtcgggcagatgttgtggtgagtgactcatccattgcaggtgtgcaaacattaaatattaacgaaattttatcggctacaactgagtatgaaccgagctttaacgccgaaattaaccgacttccggcatattatttatatacttcgggaagtacaggaactccgaaatgtgtggtcttaaataatcaagccacagaaaacacgctacaacagacgatctcggaatggaaaattactgctgacgatgtgattatggcggtaacaccgtttcatcatgatatgtcggtatttgatgtatttgcttcaatggcagtgggtgcaactttggtggttccatcttttgagcaaagtaaaaatgctgttgtctgggccgatttagtagatcgttgcaaggttacgatttggagcagtgtgcctgccattgtcgatatgttgttcagtgtagctcaaaaagaacaattacaatctttgcgtttaattgcccaaggcggcgactatatcaagccctcacttataacgaagttaagacaacaattacttaacgctcgtttattttcattaggtgggcctaccgagaccacaatttggagtatatggcatgaaataaatgagcaggatcaggaaattattccgtatggaaaagctttagaaaataaccagtattttattttggatgaaaatctgaagccttgccaaatgggcgaggtcggtacgatgtacatgactggcctaaatttatctaatggttatttacttgatggggaaattaattataaagatttcgttgatattcaagtgagtgaaaatgaaactcaaactgcttttcgcatgagtgatcaagggtattttagggaagatggaaatattatttttgctggacgtgaggaaggttatttaaagataaaaggcgtgagaatctctgcggccgaggttgaaaatgctttaaccaagcacccgtatattcataattgtgtggtggtaagttgtgtacatccaacgactgaaactcaagagttagtcgccgtttataccctagaaaataaatacaaaactactcgcttaaatagccccgaattaaagaactttttaaaagtgcatttgccgagttcacatattccttcgaaatatttgagcatcgaaaccatacctctgacccgaaatggaaaaattgatcgtaaagctgtgcaagaaatcgctcaggagaaaatttatgtatcttctacgttgtctgcaaattccactaaaacactgtcatcagtcgctgagctgggagattcggttttatcgattttccgtgaatgcatagctgacagccaagctgaaaaaatggatattttttatagaagtgaaatattagcgataggaattcgtccgaaacaactcatgagtattgctcagaaactttctcagaagcttaatacacaaattgatttttatacactcattagctgcaaaacaattcaggatgtggtgaataaagtagagcagcaaataaaatagaaaaattgaaatgtgcttaaaagcagagtcgagatgtttgcttttaagcacatggttggttttagggcaactagatttgagctaaggttgccttaattttttcacagatactttgcactgttgcagtcgggaagcggtgggcttgataagtaataatcatgcttaactgatgttgtccatcaatcacattttccataatttcaaaatgtaacccgaacatcgattcatcacgttccggcaaaatctgacgataaggaaggttttgtccctgaggtgttttgagcgcgccgtttaaagcgttatttgaatggatatgaataaacacatcaaataatagcccttcatcggcacgcatccctaacgcattttgaatatggttgattggaatatctgcataggccatcgaggtattaatcattgtgctgatattgtggagcaatgattggaatgaatctgaagggctaaactgtgtgcgatgcgccaccatggtcgtaaagtaacccaccgtatcaaagaactcaggatcagttcgtccagaggcagaagtaccaatcacaatatcttttaaattaccttgttgctgtaatgcatgggcgatagcagtatagagaaccgtgaaaatagaagagctgtgttgtctcgaaaatgcgagaagcttttcatgcatttctggtgcaaatttaagttcgagccattggactggaggtttttccttttcagcatttaattcatgttccgaaacaggaaggtttagtcctttggttgctcctcttaataggttagtccaataatttagatggtcttggttgataccttgtttttgctggagtaaagaaaaatcaagaatggattgggcaggtgccttccagtttggggcttgagcatttgagcgagcaagataagcatgcgcaaggtcagccataatcgtatttaaagaccattcatcaatcaccatgtgatgaactaaaaacgataaagtttggcgacctttagcatttcgaattaaacgaattcttaggggaagttcacgggttaaatcaaatttatatgaagcttcacttgcaagcgttgcatctttactttcggcactgttccaaaaccatttgaattgttgaagttcagatgtaggaataacctgttgataggtttgaccattggcgctattaaaaattgtgcgtaaacctgcatggcgctcaacaatatctgtaaacgcttgaaagaaaacatcttcattaatttcttcaaggaattctacggcaaatggtaagttataaattgggctaaaatcgaacgcggaataagcttgccacaggaaatcttgagctaaagtaagcggggcttgatcgacactttgtaaggtagttttttcagtttttgcagatttaactaaagcgtattgagctaaatcagcagcagatggagatttaaagaaatcattaaattgaatctcaattccatgtttattgagtaggttcccaataattcgcgttgctaatagtgaatggccgccaaaatcaaaaaagtcatcatgttgactcatttctggttcagcgagcgtatttcgaaactcttctaaaataatttctgacacataattttggttagattgttctgacgcttttgtagaatttgcatcgagttgatttgatatatcaatttctgtcagcaccaatggcatattatgtggtgaatattgttgatatcgattttgtatagtctgaataaaatctgacttttgatagctttcatcgagaatcgggtggagcgctaaaataagaaaatagtcttgttcagtttctacaagacttgtaaaaaaagggggatgaaattctgcattccatgcttgtgcttttaaggtatttacctgctcaaatacgtgttctgtattactcttttttacttctaggcaagctgaatggtcatcaaatggatatttgtataaatcaccttcgacactaaatgtatagcggacatttaagtcaggtgtagttttaatgatgtcttgaattgctttaatgagcagttgaatgtctaaatcttgattaagtttccatagattaaaacgtcggttaacttgttcaggctgttgtaattgcaacatccagatatgttcttcgtaatcagtaaccgaaaggagagagggcgatttggaaaattgttccaacataaatgaatcctggtttatcaaatggctattttcatcaatttttatttcgcaaattttttacattagattaaatttcatataattcataatgttatagatttgcttgtttgcaaaaattgacctttttctaatgagttgatgtccacatgaactgtactgatgtaacagtagggttacattttacctttaaacatactataattgattctcatttacatcaagattattatttgcaagtagatagtgccaattgagaatgacgaatttttaaaatagaaaataaataataagtgattgattaatatttatttaattcgaaattggttgggcaaaaataatttaaagatgaaaaaaacgctcctcggaatagggctgtgattttgcctattcaaaaggaactgattctgttgtctcgataaaattgaggaattttcatgagaatattcaatcatgaaaggttaataagcccatcaaatgttgaacaaattttccctcgctttggtttgatgggactaaatttgcaatttgcatcggctttattacgctcaagtggggcacgccactgatgcgatttggcttattctgtatttttatcattttatgtatttgttcgttattgctgggggctgaacaaatacagtggtctaccttattttctttttctcatgagagttggctcactcttacagccagccgtattcctcgtttaattactattgtgcttaccggtatcgggttggcggtatgtggcgtcatcttgcagcacattgtgcgtaacaagtttgttgaaccggaaacttcgggtggtttagatgctgccaaactgggaattttagtgtcgttaactttagttccggtaaccagcacgctgagcaagatgatatttgcgatcattttttgttttattgccagcttaatttatatcgcaattatccgccggatccgttttagaaatatggttttagtaccggtaattggtttgatgtacggcagtgtactgagcgctttagctgagttttatgcctatcgctttaatattttacaaagtatgcaagggtggcttttaggagatttttcaaaaattgtccaaggccactatgaagttatttacattatttttccgattgttgtcctgacttatctttttgcacaccgctttaccgtgattggtatgggtgaagagatggcttctagcctaggacttagttatgcagctatagccgctattggtttaatactggttgccattacggtttcgaccacagtaattacggttggtgctattccttttgtcgggctcgtggtgcccaatttggtcgcactgaaatacggagaaaacttagctaaaaccttgcccattgtggctttaggtggggcgtctctattactgatttgcgacattcttggtcgctcgattatttatccatttgaagtgccgatcggacttaccgcaggtggtgtggggggaattattttcctcatcctcattttgagggagttcagataatgcgtattacaaagctgtggatgatttatctgatcgtcatctgcctagcagtatgttttttatttttaaactcaggactagattttgattacgtcattcctaatcgacttctgcgtcttgccacgattgtgatagccggtatttgcgttgctttttcctcaattgtttttcagacattggtcggtaatcgtattttgactccctcaattatgggctatgaagcgatttatctcttatggcaagttttgttgttgttcttttggggaacgcatggactaagccagttaggaataaatggtaatttctttatctctatcgttttaatgctgctttattcgtgggtaatccataagtggttattgccatatggcagaaatgatgtctttctcctgttgcttttaggcttagtccttacgatggtcgttgggacggttactcaatttattcaactcaaaattaatcctggtgaattttctgttttccaaggccttagctatgcttcttttaatcgctctcaaccagaaactttattttatgccagtgtagctgtagttattgttctattcctcggtagaaaagcactccctgttttggatgttctggttttaggacgtgagcaagccatttcattaggcattcatcatcaccgctatgtcagtttctatttagccctgattgctattttggttgcggtatctaccagtctgattggcccgacagtatttatgggcgtattcattgccaacattacttatgcgctagcaagaagttataagcataaattaacgctgcctatgggctgtgccatcacgattgccatatttattgctgctcaaattttagttgagcacgtttttaattacaaaacgaccgtcagcattctggtcaatctggtatgtggcatttatttccttgcgctgacggttcgtacccgaggtgttgcatgattcatgtcaagaatatcaataagtcatatggaaataagccaatactgactgacgtaaatgttgaatttcctacaggtcaggtgacgtcactcattggtccaaatggagccggaaaatcgactttgctcatgatgatggcacgtttaattgagccggataaaggcgagatttttcttaatcatcaaaatattgcggatattaaaaccgctgtttacgccaagcatgtcgcgactttacgtcaagcacccggctttaatttgcgcttaaccgtagaagagctggtgtcatttggacgctttccctatagccgtggtgttttaaccgagcaagatcatcaggtggttgatgaagctattgagtttctttctttagaaccactgcgcaaatcttacatagatgaaattagtggtggtcaaaggcaaatggcctttttggcgatgacgatcgcccagcaaacagacgtacttttattagatgaacccttaaataaccttgatatgaaacatgccgttcaaattatgcgtgcactcaggcgcttatgtgatgaacaagggcgcactgtgattttagtcattcatgacatcaattttgccacgaattattcggaccatattgtcgcgctcaagaacggcaagcttcatttcagtgggttaacggaacaagtgattacagaggcgcaattaaatgatctgtacgagcttgattttgaaattacatacagtgagcgtggctgtatgtgtaattacttcaactcatctggagcttgaatacatatgaactggaagaaaaagtatgggggagtagccctcatcatagcggcagctgtcactctacaagcatgtgatcaaaaagttgcagataccactcaagcttctcagaagctagcagaaccgattacggtgaaacatgcgcttggaactacggtgataaatcatttaccgcaacgcgttgccgtacttgatatgaatgaagctgactttctagatcaactcaatgtcccgattatgggaatgccaaaagattatgttccacactttttggaaaaatataaaaaagatgcacaaattcaggatttgggtgcaattgtacagcccaatatggagcggatatatgcattaaaaccagacctaattttgatgacgccattacacgttaatcattatcaggaactgtcaaaaattgccccgaccattcactacgatattaacttcaacaatagcgagagtaatcatattggtctggttaaagaccatatgatgaccttaggaaaaatatttaataaagaagatttagcccgccagaaagtttctgaacttgatgaacaagtgaagcaagtacaagccgtaacggccaatcgcccggaaagagcattagttgttcttcataacaatggggcatttagtaattttggtattcagtcacgctatggctttatttttaatgcctttggggtaaagcctgcaagtggtgtggtggatacaagtctacatgggcaacctatttcgagtgaattcatcaaaaaagcggatcccgatattctttatatcgtggaccgaactgctgtgatggaacatcgctcaaacattaatgctgccagtgttgaaaatccattattacgtcaaaccaaagcatggaaaaacggtcgtgtcatttttgtcgatgccgatgcgtggtacaccacggctgcaagcccaacctcactcaaaatagtgatggaagatgtgaaaaaaggctatcaataaatttttgggcacatcacttagttaaattttagagcataaattttcactattttgctatgaattttaagcagatagttaataaaaaatgaatcaaaacattaaaggtctttcaatgaacaacgttagctataaccgtaattttaaaactgggaatgatcaaagaattaatcaccgttcttttgtattaaatggtgttgcatctgcacaaatagcccttcgattaggctatgcattaggcaccgtatttgttctatgtgcatcaaatacctatgctgctgttattgataattcagcaaaaactctagaacaacaaactgctcaaacaaatgtagcagctttacccgcaattaccgtaaaagctgaacaagatgatacttatgcgggagggcaggtttcgtcgaaaagctcagttggctttttaggtaataaaaccgttatggaaaccccgtttaataccattgcgtatacggatacatatatcgccgataaacaggcaaaagatataacaagtgtgattgcgaaaacagatccatccgtgttcaccaatgcggcaagtggtggctggagtgaaaactattatattcgtggctttgagtcgagcccgagtgatatgtctatgaatggattgtttggtataaccccttattatcgaacttcacctgaaatgtttgaaaaaataaatgtacttaaaggtccttctgcattactcaatggaatgccaccaacaggttccattggtgggacagttgatctcactaccaaacgtgcaacggatgaaccattaacacgtttgactacgacatatatgtctgactctcagtttggtgggcatttagatgttggacgacgatttggttcggacaaggaattcggtgtgcgagcaaatgcggtatatcgggatggctctggaccagtagaaaaacaggatttgaaaactgagttattttcattaggaatggattggcatggtgatcgtgcacgtgtttcgacagatctttacacatccaaagatcgagtggatggcgtaacacgaggcatcaacctcggaaaagatatcgcgattccgaaaccacctaaacctgagactttactcaatccagattggtcttttgtggacattcaagataagggcgccatgatacgcggtgaatatgatctgaccaataacgtgatggggtacgcaacctatggacaaagtaaaactgaatataaatataatggtgcgatgtcagcaactgttttagataacactggaaccttccaaacaagtattggtcaactggcatttaatgttgataaaaagtcggcagatgtagggctgaaaggaaaatttaatacaggagcagtaggacatcaatgggtagtcaatgcgacatattacaaacataatcaagatgattatggggtaagaaatgtggcaggagctgaatggacgactaatctttatgatccaatttgggggaaagctgtcccttttaatgcacccctaatatctaattctgaattgcaattaaatagttacggtttggcggataccctatcttttattgaagatcgcttacagttaactttaggtgtacgttatcaagaggtagaaagtagtaatttatttgtgccgacatcgactttgactaaatataaaaagaatgcaacgacaccaggcgccgcaattctatttaaagcgacagataaagtttcgatttatgcaaactacatcgagggcttaaccaaaggtgatgcagccccccttactgcggcaaactatccaacaatatttgcaccttacaaaacaaagcaaacagaatttggggtgaagtttgatcaaggtacatttgcgcataccttgtcattgtttgaaatcaaaaaaccaagtgcttacactgatttagtaactaatatatatacgtctgggggagagcaacgtaatcgagggattgaatggagtttctttggatcaccaattgaaaatgtacgtttgatgggcggtgcatcttatattgaacctgaagtgactaaaacagccatccaaagcaatgaaggaaatatggccgtaggtgtccctaaaacacaagggaaattaggtgttgaatgggataatgaagttgcacaaggcgttttaactttatctagcaatgcaaccgcagtttcgaaacagtatatcgatcaagaaaatacattgcatattcctggacgtacgctgatagatgtcggtgcacgatataaaacttcaatctcaaatcatcctattacttttaaagcagacatcaataacttgatgaataaagcctattggggaatgcctaaactatcgaatttggctttaggcgcaccaagaacgtatatgctatctgtatcatatgacttttaatttgttgtaatcttcaaccgaataaaaaaacccgcaatcgcgggtttttttatgatattcatattttattctggtaagccatagtgctggaaagaagactgtttaggaattcgataagcattacgtcctagtaattgattaataatgactgaatttcgagttgctccgattcctaagtcaggagaaccaacgccttgctgaaaaatctcggcattttgaatgaaaattcgaccttgtccctgatcacaacgtaaagccgtaaagtcttcttgaacaatacaatcatttttatcatcaacagctaaaatagaacccttcatattttggaaccattcaggccaatcatgaacatagcctgtagctgcgacaagggcatcagtttctaattcgcaacgttgatcgagttgggtatgcaaacaagttaaacgcagagaacccgattcaagttctttaaccgattcaacctcacagcttgtgtataggcttaaaccggatttttcaccagccactgaacgctcataaagcacatcatatatatcgccaatggttgagaagctaatccctttatagatcaggccctgactagcagcaatatcgcggcgtttatctctaggcaggctttggaaatattgcatatatgcaggggtaaagcactcttgtccaagtttagaatattccattgggtgaaagccggcagaacgtgtgatccaacgaatagatgcacctgcttttacttgttctggtgtaagtgaattaaataaagcaagtacacattctgctgcactctggcccgagccaataaccgtgacctgtttacattgcttgagttgttcctgaatttttgcaaactccgctgaatgttttaccaaagggtgtttgcatgtttccagccatttaggaattcgaggtttagttccaataccaatcgccagattttggcttatatatttttgtttttcgcccgaggctgattcactttctataataaatttatccagcttggcgtcatattccacatggcttacgttttctccaaatcgacaatcgggtaattgttttgaagcccaacggcaataatggtcatattcacggcgtggaattaaaaaactgtcgtaataataaaactgatgtaagcgatcatgttgatgtaaataattaatatagcctaagggatggcaaggattggccatagtaaccaagtcggcaaagaaaggaacttgtaatgtcgtaccttgcaatagcagtccttcatgccatcgaaattctggtttgcgttctaaaaatacgcttttgatttcgggatgatgagacaaaagagcagctaaacctaagttgaatggcccaataccaattccggtaatatctatttttttcatgtttatactttatctgtttccaaaatgatgaaagttcaaaatacgaattaatgtggtgttactagtttctctacatcagcaatattgcgacattgaataagttgaacaggtgagagctgaatcgcgtatgtttcattaatacgttttgaaacgacctttaaatgatgtggacgcagcccgagatgagtaaaatgagttgagttgtccacttccatatttggcgggtggcctatcacttctaagtaaatgtcgagtagttgattttgctgtttagcattattttcaattggtatagatgaatgatcggactcattatttttaaaatatagtcgtttattttgaagctcactgaaaaaattgctgagatcaaaactgaatatttctgaaccaataatttgcttgattgctaattgcagtgcatccaagaaatcgtcaatcatgttgggtggaaatgcttcttgggcataatcaatatcgaaaatcaaagcgccgtcatttcttgtgctaaagcgaatatcaattgcaacttgaggtgtttgggtcagtccatctagttgctgaataggatgagattcagataataccggccatgacaaaccatttgtaattacaatcggtaatactggagcagtgccaactttttcaaataatagtcgagcgagatcaacgcctgaaaatgaaagatgctgtaaaccctctaaaacttcagtttgcaaacggtttgcttgttcagcaaattgatctgaagttttccactcaacagcaataaacgtagagctattagaaaatggtccggcatagagaggaagtgtaggaacagcaacgcatagagatttgtccgtgctccaatgagatagcacttccaaaataatcgccatgatgattgagtttttaaacagtgaatgttttgcgccaattttagacaactgtttaaattgatctttttctataaccaaacttttacgttggtaacgtgaagtcggtaaatgctgtaagggcgttttccacggaaacgcaggaatagccgataatttagaaaattttctttcccagtaagccatatctgtgtgatgaacagataagctattttcagcttcattttcttctatttgtgtttggatatcatgttgttgcccatcaaatagctctaacataagtgaagctatagatcggccatctaaaatcaatgcatcaaagcggacaaaaattgttaatagattattttttaataaaaatacggtgatattccaaggcgactgatttaaatcaaatagctcatgcgtataactatttttataggactggatgtggtgagaagcacgttcaggttcccatgtagttaggtctatttcttttaaattgacactcacttgatcgcttatatattgtattaacctatttttatcaatataggttcgtaagctgtcatgctgccgtaccatttctgccaatcgttgtcttaataaaacaatatccattttgccgtgatactgcctaaactcttgcatggcaacaccacctaaaggaagggcttgagttcgacctaataggtaggcttgttgtaatgcatttaatggtttttgagacgtacgatctgacgaggtattttgtgctgggcttataatttgtgtattaagttgctcaggatgtgcggcaagatttttaagtaaatgaatgaaagattcaaataaattcgtgatccattctttgggtagagcatctaaacggatgtcccaattaactaaaataccgtcatctacatgagcaacttgtgcatcaagtgcaacttgtggcccttgtgaaatgacccaattcattgaaccaaaaacacgacggacatgctcagaaagcaaattattattttctaagtcgagtgccgctgtaaataccacgggagcaatctgtgcactaccatgataacgagacaggtcacgtagaacattaacacccgaataatgtgaatgctctaataactcaagcatttgatttgctatttgtttgcagaatgcggctaaggtagttgtccctttcatgtcgacatcaaggatgactagattagcaaaatcaccaatagtgccttcgacattttttaaaactggctcgcgccaaaaagtaggaatatttaatcggaagctgtgatctttggttgcatgaccaagcgtataggcaaatagacctaatatcaggttggttacagtaatatgttgttttctagcaagttgttgtaatgctgttcgttcttttggcgatagccaagtacttaaacgatcactttttgctgttttgaattcttgatgaatgaaaggtagagacggagcagggctaatatgagaaagacgttgtttccaccataagcggtctcgttggcttaatttttttaggtcaggatctgtccgtattttttgataccagtcaaaaaaattaggcggacgggagaatgatatttctgggtcttcataaaacaaagaaagatcttccatcaagttcaaaaaactggacggatctatagcaatcatgtccgtatctatatgaaaacgaaaaatattatttttaagaacacttatagaaaatcttgcagtctggccctgacttagatcaagtttttggtgggtccattgctcccgtttttgcatgagcatttgctcaatttgataatcgctaagctttgaaaaatcatcgacttctaatatctgttgagtcttctcagacatgatgtttgcgatgccatcggcactcaaacttaatctcaaaatagggtgttctttataaagtcgttgaagtgctaaatgtaatttttgtagatcaataaattgaccgtcaaattctgcatagaggtgggcagcaaccccacctaaagttgcgttgccagagcgaccaaaccagcaggccgcttgcatcgaagttaattcacacattgaacgataactcggttgacaaattaatcttgtttcagcatcatacaaacaaatgaaaatgattaccagttgcatttgttaatcatttccaattttgctgtgaatatatagcttgtccgtcttaagagttttctttagtcggtattcaaattaaatatttatgccgatatgtaagaaaatttaccaagaatcaatagtttgataaccattaaattaaattgaatatttagaatgtcatgaaaaaacagttgattgagtttgttcgctggtctcccgagagagcgcaacactatcgaaataaaggctattggattgaccaacctttgacgcgcattttaacggtaggggttcaatcgcatccgcattcgccggcaattatttgtggtgaacgtcagttgagttatatcgagctggatcggctatcaacaaatttagcttctcgactagctgaaaaaggcttgggcaagggtgatacagctttagtacaacttcccaatgttgcggagttttatattgtcttttttgccttgcttaaagcaggcgtggttgtactcaatgcgctatatagccatcgccaatatgaactaaatgcctttattaaacagattcaacctaagcttttaattggttcgcgtcagcatgaagtatttagcaataatcaatttattgattcacttcatgaagtaaatttaagtcctgaaattattttgatgctcaatcatcaagctaccgatttcggattattagactggattgaaacaccagcagagaccttagtcgatttttcatctacacctgctgatgaagttgctttctttcagctatcaggtggaagtacgggaacaccaaaacttattccacgcacgcataatgactatgactatagcgtgcgagccagtgccgagatttgcgatttaaactcaaatacccggttattgtgcgctctgccagctccgcataactttatgttgagttcacctggtgcattaggtgttttacatgcaggtggatgtgttgttatggcaccaaatcctgaaccgctcaattgcttctctattattcaaagacatcaagtcaatatggcatctttagtgccgagtgctgtcattatgtggctagaaaaagccgcgcaatataaagatcaaattcagtctttaaagttgcttcaagtaggtggagcaagtttccctgaatctttagcccgtcaagttcctgaagtcatcaattgtaaattacaacaagtatttggaatggccgaaggcttggtcaattacaccagactcgatgactccgatgagcaaatatttacgacacaagggcgtcctatcagttctgatgatgaaatcaaaattgtggatgaacagtataaagaggttccagaaggtgaaatagggatgcttgcgactcggggaccttataccttttgcggttattaccaaagccctgaacataattcacaggtctttgatgaggacaactattactattcgggcgatctcgtgcagcgtacccctgatggtaatttacgtgtagtaggaagaattaaagaccagattaaccgtggtggcgaaaagattgcttcggaagaaatagaaaaacttattcttttgcatccagaagttatgcacgcagctttggtcgcaattgttgatgaacaatttggtgaaaagagttgtgcctttattgtttctcgtaatcctgaacttaaagctgttgtgctcagacgccatctcatggagttgggtattgcacaatacaaacttccagatcagatcaaattaatcgaaagtttgccactgaccgcagtcggtaaggtggacaaaaaacaacttcgcagcattttaaatacatctacaacatcttaataaatattgagcagcatatggctatttcaaaaatttctacttatctcatgcccgaaagagagagttatccaaataataaaacagactggcaattagatccttctcgagctgttttattaattcatgatatgcagcgctactttttaaatttttacgatgctgaaagtgaattaattaaaacggttgttaatcatttagttcaattaagaacttgggcacatcagaacaatgttcctgttgtctatacagcacagccctatgagcagccagcggcagatcgagcattactgaatgcgatgtggggaccgggtttgccagcctcaacaatcgatcagcaaaaaattattgatcaactttctcctgctgaacatgacattgtcttaacgaaatggcgttatagcgcgtttaaacgttcggatttgcttgaaagaatgcaaaactggaatcgtgatcagctcattattggcggtgtctatgctcatatcggttgtatggttacggcaattgaagcttttatgagtgacatacaaccctttctggttggggatgcagttgccgatttttcagaagaagaacaccgcttagctttgaaatatgtatcttcacgttgcggtcaagttgtggataccgaatctgtagtggggcaggtggcaacaggcattacacgaccttggttagagcaaaaggtccagcagcttattgaagaagatgaattagatccagaagaaaatctgattctttatggactggactcattacgaattatgcagttttcttcggaactcaaagcgcagggaatcaatatcagttttgaagaattaggacgcacacccaccttatcaaattggtggtcattggttgatgcacggcaaaggattgcagggtagagggttgccatcataaggcatacgacaaatcctggtcgctaaatttatacataaaatttatatctttgatagcgactccttagacgacttgtaatcgtcatattaacggagcaaaaaatgattttatcgcctgctgatcaagagagaattgagacattctggaattactgtttaaaacatcaatacttcaatattggatatcctgaatctgcagattttgattattccgctttattccgttttttcaaattctctattaataattgtggtgattggaaagactatagtaattacgcattgaattcttttgattttgaaaaagatgtgatggcgtattttgctgaaatttttcaaattccctttgaagaaagctggggatacgtaaccaatggtggcacagaaggtaatatgtttggctgctatctggcgcgtgagctatttcctgattccacattatattactcaaaagatacgcattattcggtgagaaaaatcgccaaattattgcagatgaaatcttgtgtgatcgaatcattggataatggtgaaatcgactatgatgatttaatccataaaataaaaaccaataaagaaagtcaccccattatttttgcaaatattggtacgaccatgaccggtgcaattgatgatattgaaatgattcaagagcgcttagcgcaaatcggaatcatgcgccgagattattatattcatgccgacgctgccttaagtggcatgattttaccttttgttgatcatcctcaagcgttttcctttgctcatggtatcgactcaatctgtgtgtctggtcataaaatgattggctcaccgattccgtgtggcattgttgtggccaaacgccaaaatgtagagcgtatatcggtagatgttgactatatctctacacgtgatcaaaccattagcggttctcgtaatggtcataccgtcttactgatgtgggcagcaatacgtagccaaaccaatttacaaagacgacagagaattcaacattgtctaaaaatggcccagtacgcggttgatcgctttcaggcagtgggcattcctgcttggcggaatccgaattcaatcactgtggtatttccgtgtccttctgagcacatctggaaaaagcattatctagcaacctctggaaatatggctcatttaattactacggcacatcaccgagatacacgtcagattgatagcttaattgacgacgttatttttgatttacaaggtgcctctaaacgtacagttggtttttagtcatatcaaccaagatgatttagacaaatccatattaattttacagtctagaaaatgatctaaaaatattttgatagggtggttaggaagtttttgatgcaattaaagtttttaaaaaaatactttttatatgattttcttattcatgcttttttaaagccgaaaaaggcaattcttgctggtcaattgaagcgagattttattttaagtaccgctttttctatgaatataaagagagataagcatgtctgatttaaagttatctcatctgatgacagactcttccttggcacctgcactcaagccagcatttcctaaattatttgcaggaacgcttgctgccgtattttctggtttagccattttaactgccttgtggggcatgattcagttgattggttatttatcttcttattgggtgatcttttcagcggttttttggatagtcggggcggcattggcagcactagcttcatggttagtgcatgatgcagaggctggattttcggcacgattacgtcgtcaaattgctcatcatttaattcggttacctaacacaaccctatcaaaacagggtgaccaaaacttaaaacgactggtttcagatgatatcgcaaccttacaccatatggtggcacatttaccgtcggaaattgcgatttttgctgtaatccctttagtttctattattttattaattgctttggttggcccgatggccctttgggtattattacctggggcaattgcttcactctattatttaattattgttccccatgtatcaaaacgggatggcgctgcacgtatgcaggtcatgttagatattattggttctgctgatgattatgcgcgcggcattcgtgataatcgaatatatgggcaacaatcaggtgctttaacagcctatattcaatcagcacaaaattttactcaaaatatggtgtcttgggtgagtaaagtcgcaacactcgctgctgttgccacagccttactacaagctgttgcaacctttgccatagcctattttgtagcttatcaatacgacagcatgaccttggctgcaacacttttctttagcttggccatcgtgacaccttcgctacgtttagggcatggtcttgattatgtcgctgctgggcgagctgcagctagtcgtttatctgcattcttaaaagagccagtactctcgtcgggcaatctacaaaagattgagcaagatgtaacacttgaaatagtgaatgcaagctttgcaatcgaaaatcaaaaagtattggatcgattaagttatgcatttccaaaaaattcaattactgcaattacaggaccgagtggagttggaaaaacaaccttactgcgggcacttgctgggttcgctgtattgcaagaaggtgtcgttcaattagcaaaaacagatattttgcaattacatgaaaaactaagacatgaaaaggttttgtttattccacaaggtggagatgtattaccgaccacagtaagagaaaacttgtccttatctgccgttaatgcaaatgatgcacaacttgagcaggcattactcaaggcccaactaaaagtagatttaaatgcagatgcaactttactttcaggcggtgaaaaacagcgcctaggaatagcgcgtgcgtttttatcctcagctcctattattttattagatgagccaacgagcgcactcgaccagaccaatgcgacaaaaataatattggaattaagcgacttagctaaaaaacagaataaaaccatcgtcatggtcactcatgatcttgccttagctgctcatgccgacagtagattagtgcttaaaggcccaactgactcagggaaatctttatgaatactcctgctaaattaaataaagatcagattttttcgatgcttcctcgtgcggccaaacaaaaattaattattgttggtatcggatggatcattgttgcagcaattgaagcaatcgcatataccgtcttggcatttgcaattgtcaatcaatggtcaccaagctgggttctcatcagtgcaattgcagcaatattagtgacagttatagtcactcgtgctggcttccttactggtgtgcgtttagcaggggacctatttgctgagttaggcaaatctttagctcgtgccaagctctcttggtttaccaatgaacagcgtgctcagattaagacaattgctggacagggaattcctgggtttatgagtattcctgctcatcaattgcaaacctttttacatgcgccttttatgcctttatttctcacaataggaataggcctgcttgccggagcaggcgtagcatttgtcgctttaggcttacttttactctctttatttgctcaattcctagcacaacgtgcactcatgcatattgataaaaagcgtaatactgccgatttagcggcttcacaagcaacgctggaattggttgatcatgttgagttattacgcacagccgcgggacctgaacgtgcggtccaaaggctagaacatcgttgggaagagcaagaagagacattagtacggattaatcgtgctgctgcatttgcaagttttattgcaaccttagcaagtgttttacccattgctgggatggcaacatatctggtgatcgatggggtcaatcatgctgctttggtgttggcattactcgtcttaattggacgtgcagcagcgccattaggtgaacttgctaccgcagggttacatatcaatgatttgtttgctgcactgcgcaactttaatcagatcacccatccacctgagttgcctgagccattacaccctcaaattcctactggccatcatatttcggtacaagacgttagctatgcgccagcacttgaaaatatatctctcgatatcgcattggggagcagagtatgggttaccggaccaagtggtagtggtaagagtactttacttgaattgcttacacggtttgatgatccacaaagaggaaaaattacccttggtggcatagctcttgatcaaatgaaatatgaagatttggtctcgaatatcgcttatgtcacacaagaacctattttgttcacaagtacactggctgaaaatatccgtttaggtaaacctgatgcaactgatgatgaaatagaaaaggctgcaagagatgccgcattaggagcaatgattgaccgtagttcagaaggaattaatcaatcggtgggtaaacaaggcaccgcattgtctggtggtgaacgtcagcgggtcgcaattgcccgagcattactcaaaaatgcgccgattttaatacttgatgaagcaacctctgccttggatgaagagactgagcaggaaattgttacaacgatacgtgctctttcttctacggttatttttgtgacgcatcgtgattcagccatttggcaaccgactcaaactatcaatttagcttcaacttctgtttaaaaaaatagcgcagaaacctgatttaagcattttttataaaagaaaaatgcttaatatttggagaattcttaagtgaataaacatcaatataatatgttctgtttaccgcctgcggggagtagcgcgagtatttatcatccatggaaaaagcagatttctgacaatattcgtattattcctattgaatattcgggtcatggtataaaaataaatgaaccattgattgatgatcctgatctattggctatgcaaattgccaatgaaatacaagcttactcagacacaccatttattttatttggacatagtgtaggaggtggcttgatttggaaagtactcaattatttgaatgaaaaacccataattgatcagttgagattaattgttataagtagccgacctgagcaccactatattcaacatatgcggtacaagcatgagctaaccgatgaaaaaattattgatgaattaaagcgatacaataattttcctgacgaaattttaaataatcaggaagcactcacattctttctcaaaatcattcgtaacgacttctatcttagtgatcaattacttagcgagaagattcataagaccgaggttccgattgttgcattttatggtaaacaggaccctgatattcctaacaaaagaatgatggatgcatggcaacaacacacagaaaattggttaggaagtattgagtttgaaggggaccatttctactttcttaatcccgagactcgagtgaagatgcttgaaaacattgccgccatcgttgaaacattgaccgtgaatattgaataaagtccatgctatgaatacgaaaaagcagttaagtagaggggctaattcatgtctggatgaaataaatattcaatatgaaaagctaacagctttcgggatagatatacataaggtccagctcagtgaaatcaaagaaatacctcagcttgatcatatctatcaggagctgaatatatttcttccaccgaatataaaaagctcacgcttcattcgtcaattagagttcttgacggggcgcttagcagcaaaatatgcattacaacgcttcaatttacaagactctattgtccatcagggtaaacagggagagcccctatggcccgaaggagtgatgggtgggattagtcatgttggatcaaaaaaatcatgtcatgccatcgcatatgttagaaataacacgcttaaagaaaaaatatttggaatcgatatagagtctcaaaaacatcatattttttttcaaaagaaagatgaattttatgatgtttttctcaataaaaacgagcaagcagaaattgaaaagctactaaaagatcaagcatatttatatttggtaatattctctgctaaggaaagtatcattaaggcattttatttaaaatataagcaaattattgattttaagaatataaaatttaaagcgctagatggcgcgtttctttatttttaccttagacaagaaagtttaatcgagataactctagaggttaaagtttatttttttcatacaaataacgagataattacaatttcttgcattgaaaactaaatttgttattgataataataatcatttgcattaatgtgtgtttcagtatttttatatccttatatttaaaaagaagtactacagaatttgcttgaaaaaaatcaatgtgagaggtgatatacagatgatgcagactcaaatatcagtagagcaaaatttagatcatatcggtcaaaagaaattttcatgtttttctacgaagaattattatctcgaggtcaacgaattcgttaaaacgttaaatacacctgcagcaaataccgcactattgaatgaagagattgcaaaatgctttgaagaaattaaaaagcaaggccatcaaaatccagttttaattggtgctataccttttgatattacaaagaaaagtagcttaaatttttatgctgatcataaaaaaataacacaatcatcttctacgattaattcattaaaaaatcgtaataacattgagataattaataaatcattgctcattcaacgacaaaaatttgaaggtacagtacagctagctttagatgcttttgagaaaaagaaggtagaaaaagttgttctctctcaggctgttgaatatgagtttaaccgtcatcaagagcctgaaaatttattggctgctttattaaaacaaaatccaaatgcttataattttgtgattccagtcgagcataataattatatcctaggtgcaagtcctgaactgcttttgtcaaaacaagggcgtattgtaaccagtaaccctttggctggctctcgtcctaaatctcaaatttctgaaaaaaatttcgtcagccaacaagaattaaatcattccgagaaagatcaacatgaacatcgaattgtggttgaaaatattattagaaatttagctactcattgtgtagagcttaaggtttctgaatttccagatattttagaaacttcaacgatgttgcatttatcatcagaattccaaggtgtgcttaaacaacaggctcccgatgccttaaaccttgcattagaattacatccaacaccagcagtttgtggctcaccaactcatgttgctaagcaatttattttagatcatgaaggttatgaccgacattattacacggggttagtcggctggatggatgcggagggtaatggtgagtgggtagtgacaattcgatgtggtctactcagtgaaaataaaatgcgcttatatgctggtgcggggattgttgaagggtcagatgctgaagctgaatggctagaaacagaagctaaaatgcaaaccatgctaaatattctaaatacaaaagttgctgtgtaattagtaaacctaggcaggttttatttttatagccaaaacaataactacatattccacggggctatgctaaaaaatttaataaaaaagcctgcataaagcaggctcttttaattaagaggattattctaagaatttaacagttacgcctgaacgtactttattacctaaatcgttagcatcccagttcgttaaacggatacaaccgtgtgatgcagttttagaaattaaagacgggtttggtgtaccgtgaataccaaatgattttttgcttaaaccaatccagatattacctacaggagcatttggacctggtggtaatgaaagcggttttaagttattgccttgtacaaagttagaaggagagtagctgtaccaagggttacgtgctacacctactaccttgtaagtaccggtcggagatggcgtatcagtactgccaattgttgcaggaaatgacgcaatcatttgattacggctgttaaacagatacaactgtttcgcacctttatgcgcaataatcaagtgaatatcttctggtaagtcattgcgtacatttggaacaatgattttttcaccaacttttttgaatgtcgcagtcgggttaattttctttaagaaggcttcatcaatatgaaacttctcgcccaacatttcacttacgcgtgtgtagtacaaacctttcatttttgcttgtaaagcatagtcagaaggaattgattgtgcgtaaggaccttttaaatcggcatcggtaatggtgtattcaataaacgctggtttgttttgtttagcaacaagcgcatcccaagtctctttagttaactcgccagtaggagataaaccattcatttgctggaaagatgcaattgcttttaatgtatttttaccgctcatgccatcgatagcacccggtgaagcatgtgcattattaagcataacgtgagcgcgtgcataaactggaagttggcctttgccaatattttcataccactcagcgttgtttaagctatctaatgtccatgtaaccgctggcgcagaagttgctgtagacgcagtagctgttgtggttttagccgtagctactggtgttgaagcggcaatacctgaatcagcattttggtcttcagctttttgtaaattttgtaatgttgttgacgctctatttaggtcattttgttcttgtgcagtaatctgagtctgagcttgagcttttacagttgaagcagcatctacagcaagcggatcaatcggatcttctacaggagcagatactttattagggttcagtggttgctcagttgttgacgcagccaaagcaacattagcaataatacaacttaaactcatagcgagtaatgagcgaacaaacatgtaattcaaccttaagaattttcatataagcaatagggaaaatcagatcctttaggccataaattcaccaatcattcattcttatgaatttaatattggcttatttgagactcgaagggatataaataaacccgatgtaacatgctgcaagtattgcagaaaacgtttcttcttgcagtagacttttgtgtaaatatgcattttttagtagattggcaagttttttgtgtgaaattgaaattataaaaacactcaccttttgttatgatgctgccacatgaaaaagatagagatcggcaatgacgacacttaaaaatgatcgtttcttacgtgctttattacgtgagcctgtagatacaactccaatatggatgatgcgccaagcaggacgttatttgcctgaatatcgggaaacacgctcaaaagctggtgactttctatctttatgcaaaaatacagaatttgcttgtgaagtgactttacagcctttgcgtcgctacgatttagacgcagcaattttattttcagatattttaactattccagacgcattaggacttggtctgtattttgaaactggagaaggtccgaagtttcataaaacggtacgtactgaacaagatgtggctaacttacctaagcttaatgctaaagccgatcttgattatgtgatgaacgcagtaagtacgattcgttctgctttaggtggtcaagttccactgatcggtttttctggtagtccgtggacgcttgcaacttatatggttgaaggtggttcaagtaaagagttccgttttaccaagcaaatgatgtatgcgcagccagaagttttgcatgccttactcgaccatttagcagattcagtcattgactatttaaatgcgcaaattgatgcaggtgctcaggccatccagatctttgatagctggggcggagcattagcacaccgcgaatacgtcgaattctctttaaactacatgaataaaatcattgctggtttgcagcgtgagaaagatggccgccgtattcctgttattgtgttcacgaaaggtggcggtcaatggttagagccaatgattgcctctggtgcagatgcattaggactggactggactactccgcttaataccgctcgaaatgttgtctctgggcgtgtagcgttacaagggaatcttgatcctgctgttttatatggctcggctgcttccattgaaaaagctgtaaaagcaatgttagatgatgcttatgcaaacggtgagaagaccggttacgttgctaacttagggcacggtattacccaatgggtagatccggcgcagccaaaaatctttgtagatacggtacatgaatatagtgctaaatatctaggatagttttttgtgcaatatctgtttttacctcttcaatttattggcaaggctgtttcggcagccttgtttggtattttgcttctcatcgcttttgccctaactgcgtcgatgggaagccatgaatatatgggtttttatcgctatgattatttactcatatatgcactgattattcagatatgtctcttatatttaaaacttgaatcatgggcagaagccaaagttattgctttatttcatatcatggcgatggtcatggaaatattcttaacacatcctgcgattgcatcctggcaatatcctcagcctgcggtatttaaaattttgactgtgcctttatttgcaggctttatgtattcggctgtaggtagtttttttgcacgctcaatacgcctgctgcaagtttcatttgaaaaacttccgagtttcggaagtatgcttttactggcatttttctcatatataaactttatgagtaaattttttgtacccgatattcgctatattttatttgccatcagtgtttttattttttggaaaacaaaactttatttccaattaaatgagcataaatttaaaatcccgatgttgcctgtattgtttacactcgcttttctgatctggattgctgaaaatattagtaccttttataaaatttggctttatccaagtcaggtagaggcttggcatatggtggggtggggtaaacttggatcatggtatttattattgcttttgagtttagtgttagtacttaaaatattaggtcatcgagataatcaaggtaattggaatttaagataaatttttcttttacactttttatcatattatttattttttaattgctaaatgattggcttatcgctatctttaatatcgtgtaataagaattacacataacaatacataagaaacaatcaataatgatttttggagatatacatctatgttaaaaaaattagctttagctgctttgttagcagctggttcaagtgttgctatggctgataacgatgtaggttgtggtgtgggtacgcaagtatgggctggccaaaaaggagtggtgcctaaaattcttgctgcaacaacaaacggtatttttactaaccaattattaggtattactttcggtactttaggttgccgtcaaggtggaacagttacagcacaagttgttactttcacaaatgaaaatgcagaagctttagcgcgtgacatggctgtaggccaaggtgaaagcctgaatgtacttgctgagttaatgcaaatcaaaccacaagataaagaccgtttcttcaaagtttcaaaagcaaattttggtgaaatctattcaacaaacaaccaaaacacacttcaagtattagcatcattacaaaacgtaatggctaaagacgaagttttaaaagcttacgtataagtttgaaattgaaaaccctgtcatttggcagggtttttcttatatttaatgattaaaattgatgagcttaatgaaatcggttgttttaatttttgcctctttggcagtgaatattgcgtattcagcagaaacaaatccatctattcaaaactactggtccattgcagaacaaaaaaattagaccaagacattacatggcaaaggctcatgtatgccaataaaaaccagaaaagtgaggtcacttatgctggctattttctatcagaaaatggaaaaaataatttaaaagaagaactgaaagcagacatctcggcattatttatacctacgcaagataaccagtcaattcgctgtaaatttccggcacgcagtcagtggcttatacagcaattaggcattcaagaaaatgaattgccgcaagtaaaatgttcagaatttgaaaactggattgggcagattaagccttacaaagcgaccctaatttacgctacagattttatgggtaatccaagctcaatgtttggccataccttattacgtttagatcctaaagatcaacagcagttaaacctcgtttcttatgccgtaaactatgcagcaactgtggcaggcaatgacaactggtcatatgcatggaaaggcttaacagggcaatatccgggtgaatactcacttatgccttactatcgtaaggtaaaagaatatggtgattttgagagccgtgatttgtgggaatatgagttaaatctatctccagaagaaacgcggtttttggtgagtcatatttgggaaatgcaacatgtaagcttcccttattactttgtgagtgataactgtgcatatcggttattgggcttagtcgatttagttaaacctgaatctcatctacaagaaaagtttaactacgcttctattccaatggaaaccattaaagcgatgcaacaacagggactcactaaagctcctgtgtatcgacctgctttagaaactcaattattggcccaagctcaccagcatggtgcatctttagctaaagttgctcatcagttagcaatgaagccaattaaagagtcttcggaaacacttaaatcatttagcccatcagatcaggccaaaattcttgagatggcttatgatgatttatatctacagtttattggtcgcaaagttgaagaaagctttgctcagccacagcttagacagcttttagcactacgaagtcagattgatttagacaaacagcgccaagaacctaaaagaccatcaaccgagccgactcaaggccataatgcacgtaatgtctcgctaaaactgggcgaggtgcaaggtgacaagtttatcgagataggtcatagacaggcttatcatgacttaatagatccgcagggcggataccgtgccggtactcaattattatttttaaatggtaatgcacagtggcgagatgatcatttaaaactagaacatcttgatctgttagaagtgaactcttataacccgattcaaccatttaaaactccgctgacttggggatttaacttaggctggcgtcaggaagcggttcatgacggcgtttataatgatgaaaagcagcatggcgtcgcgagttttaatgctcaggttggttacagtcttgcagattatgagcgtaaatatatttgctatgggcaggtacaaacttatgtccaagcgggttcaaatttagataaaggctggcgtgtgggagtagggccgacattaggatgtatgaatcagtggcttgaaaaatttaacactgtggtacaagttgagctgccatattgggaagaccaaaaccaatggaacttacggctaaatacacagtggcaatatgccattaatagtaataatgccattcgctttaattgggattatgaaaaacaaaatcatctggactggatgaaatcaagcttaggatatgtttggttcttttaaaccatatacctataaaaaatagagaaatagatgatgactatttctctttttttattttagggaaaaattatttctttattgcattcagcacagcataagctgccttaatgcgctcttcatttggaatacgtttattggttaacatgactaaaccaatattttctttaggaataaacaccacatatgttccgaaaccggtagttgagccagttttatggtacatcttaactgaaggttcctttgaaatagcagtcactttattaggtttcatcacaatctgttctgaattactgtctaataaagtttgtaacgttgccggataagaaaactcttcccaaccgagtgcctgatacatggtatttacttgatagcgaccctgatgtgtttcattaattgcccgttgaatatctgctggatatttttgtggatttaggttggcatgaataaaactcaacatgtcgggtagtgtcgatttgacgccatatgctagggcatcgagtgggccggggttaactcgaatcggctgattttcttggttatagccaaaagcatagttttgcatctgggtcttaggtacatttacatagctatgttttaagccaagggccggaaaaattgttttttctaagacttggtcgaaaggtttattcatagacaaagctacaacttttccaaataaaccaatgcttgggtttgaatattgtcgatattcaccgattgagtttttaggtttccagtctttaaaaaatgttaaaacttgctgatctgtttttacttcatctggaaattgcaaggcaaggttaccacttgtatacgtcgcgagttgaagtaagttaacttggtcaatcggtgtattttttagttctttccaatacttaccaggcgtatcgtcaaaagagatttttcctttattttttgcatatccacctgctgtcgcggtaaataatttactgacagaacctagctcaaaaatagtactgctatttacggcttttttatcttgaacagattgaagaccataatacatttcatactttttattattttgaataacacccacagccatacctggcacatcatatttttctaataacggtttaaagttttgatctaccagttttttaatttcttggtcttttggtgtattgcccgcataaattgaggtactaaaaataaaaagcggggataaaagtagacaagaaatttttttaaatcgcatgattagctcctctgtacacgataaaaatagataactcattgaaataatgtcataataattgttttctaacgacgaatactatgacacatctcaatgagttatatcttatcttaaacaaatatctaaaatggaacaagtcacatttaaagtgctttgcgctcatcatgcttgtgattattttaaagcaaacatgtaatctttcttctgcatctaaagccttgcccatcaagtgcttaccacaatcattttatcgacgtatgcagcgcttctttgcaggtcagtattttgattatcgtcaaatttctcagttgattttcaatatgttttcattcgaccaagtgcaactgactttagatagaaccaattggaaatggggaaaacgaaatattaatatcctgatgctcgcaatcgtttatcgtggaatagcgatacctatcctttggacattgcttaataaacgtggaaattcagatacgaaagagcgtattgctttgattcaacgctttatagccatttttggtaaagaccgtattgtgaatgtgttcgcagacagagagtttatcggtgagcagtggtttacatggttaattgaacaagacatcaacttctgcattcgtgttaaaaaaacttcattgtcaccaatcatttaggaaagaatcataaaattagtgatttatttcgccatcttaaagttggtcaaattgaatgtcgtaaacgacggattttggttggtcgggtgaaactatatataagtgcactacagttagaaaatggagagcttttactcgtcgtttctcctcagtttaatgccaatgctattcaggattatgcattacgctgggaaattgaaaccttattcagttgtctcaaaggacgcgggtttaatcttgaaaatacgcgcttgacagaccctagacgagtgaaaaaattgattgcggtgttagctataagcttctgttggtgttacttaacgggtgaatggcaacatgatcaaaaaaaagcgataaaaataaagaagcatggacgactctcaatgagtttatttcgctatggtttagactatgttcaaatggcgattcagcgtttaattggttttgggaaaaaagaagagtttaaggaaattttggcaattttaagaaggcagaaccctgataggataagggttctgtgaaatttgtcgtgtacagaggattagctcataaattatttaaaaagaaagatgcctacttttataacaaaaatcacctaatttaattgttatgttttatagaattggattgaagtttatcgcgttcagctataaaaaaagcccaacattgtcgggcttttatttaggcagtaaaaactatattagtagctttctggtactgcacttaagaattcacggcgcgcttctttatcggttttaaaatctccgacaaatgaaactgtacgggtggtagattcttgtttacctacaccacgcatcatcatacacatatgtgctgaatcgatgactacagcaacgccacgagcaccagtcacttctgcaacagcttcagcgatttgctgagtaaggttttcctgaatttgcaaacgacgagcaaacatctcggtaatacgtgcaaatttagataagccaagaactttgccttctggtaaataggcaacatgaacacggccatagaatgggagaagatggtgttcgcagagcgaataaaattcaatattcttcaccaataccatttcatggttatctgatgggaaaacagcattattggtgacttcttctaaagttttactatagccagaagttaaatatgaaaaagctttagccgcacgcacaggcgtatctttaaggccgggacgattaaggtcttcaccgacggcagtcagaatatttgcgtacgattgctgcattgacataagacgtataaatttactctattagacaagctcggcattgtatcagaaacatgacctgatgttcataaatcctcgcactatatttattttggtttttccgtacgcttgataaaagatgaataaatttcatgttttttatcgttaatagtcaagtgtttggacatgaaatgtgcgcttaatattgataagttctaaatgatcgcctaatggcatcatatttgcacagaagcattattataaagcataaggataaaacatgttagaacgtccaatcaccttctttttccgtggtggtcagcagcaagtagaaaatatagtacccacaatgacggttttacaatttctgcgagaatatactcaaactggtaagactaggcagactggtacaaaagagggatgtgctgagggcgattgtggtgcatgtacagtagtgattggtgaattggtcaatgacaacctgcaattacgtagtgtgaatgcgtgtattcagtttttaccaactttagatggtaaagccttatttacagtagaagaccttcatagcttattgcctgtacaagatggcacacttcatcctgtacaacaggcgatggtcgatatacatggttcacaatgcggtttttgtacacccggttttatcatgtcgttatggtcaatgtatgaaaatgaacaacagtctctaagcaaagataaaatcagtgattatctttctggaaacttatgtcgctgtacaggctatcgccctattttagatgcagcacaaaaagcttatgactatccacgtgtggtattagaacgtcaaaaagtaattgatgtattaaaagagatcagaacattacctgcattgtatttgaatgatcaaaagcagcaattttttgcacccaagactttgcaggattttgctactttacgtttacagttgccgcaagcacgtattgttgcaggtagcacagatgtaggtttgtgggtaacaaagcagggccgtgatttgggcgatatgctttatattggtcaagttgaagagctaaaaaagattgtagtcacagaccttgctttaacgattggggcaaatgtaagtttgagcgatgcactcattaaaatttcagatttttatcccgattttcaagaattacagcgccgttttgcttccatgccgattaaaaatgcaggcacactagggggaaatattgccaatggttcgcctattggtgattcaatgccggcattaattacgctaggtacacgattgattttgcgtgtaggtaagcagactcgtgaaattgctttggaagacttttatttagactatcaaaaaacagcattacaacttggtgagtttgttgaggcgattgttattccgcttcgtgaagggcagacacgttttaaatttgccagctataaaattgccaaacgatttgagcaagatatttctgcggtatgtgcagctatttcttgtgagttagataatgatgatgtcactcacaatgtaagaattgcttttggtggcatggcagctattcccaaacgtgcaaaatatgcagaagccatattagaaggccagcaaattacagcagaattgatcgttcaggcgcagcaggcattgtcgcaagactatcagcctttagatgatggacgtgctagctcagcgtatcgtttacacgtcgcgaaaaactgtttaaagcgcttttatttagaaaaaattctgtctcaaacactcactcgtgtgaatgacctgattgctatggtggagatctaatatgaatcaaaccattgacttaaatatttctaaaaaatcagctaaagcaggtgattcgattccacacgaaagtgcacatttacatgtgactgggcaggcaacttatattgatgatttacccgagcttgaaaataccatgcatttggcagttggattttcaaattgtgccaaaggcaaaatcagtaagtttgatttggatgcagtacgtcaagctgatggtgtccatgcagttttttctgcaaaagatattgaggttgaaaataattgggggccaattgttaaagatgatccaatttttgccgaggaacaggttgagttttatggacaagccttgtttgtggttgtggccgagagttatcagcaagcccgtcaggcagttcgcttagcaaaaattgagtatgtgcccgaaaccccaattttaacgattcaagatgcgattaaaaaagaatcgtgggtgttgccgcctgttgaatttagccatggtgaagttgagcaggcatttcaaaacgcagcacatcaactttcaggtgctattgagctgggtgggcaagagcatttttatcttgaagggcaaatttcctatgcgattccacaagaaaatcagagcttaaaagtctattgctcgacacaacatccaaccgaaatgcagttactgatttgtcatgcattaggcatgaatatgcatcaggtcagcgtggaaagtcgccgtatgggtggcggttttggtggtaaagagtcacagtcagcgcagtgggcatgcattgcatctttggcagcaaaaaaaacgggccgtccgtgtaaattacgcttagatcgtgatgatgacatgagtgctacaggcaaacgtcacggttttgcttatgagtggtctgtagcttttgatgacactggtattttgcaaggcttaaaggtgcaattggcttcaaactgtggtttttcggctgatctttctgggccagtgaatgaacgtgcgatttgccatattggcaatgcctattatctaaatgcagttgagctacgtaacttacgttgtaaaaccaatactgtttccaatacggcatatcgtggttttggtggaccgcaaggtatgtttgtcattgaaaatattattgatgacattgctcgttatttaggttgtgatccagttgaaattcgtcagcgcaatttctttgccgagcagcccggtggtggacgtgaccgtatgcactatggggcagaagtccgtgataatgttgcgccaaaattggtagccgaactattgcaaagtagtgattacgcgaagcgtagacagactattcatgcctttaatcagaacaatgacatcattaagcgtggtattgcgttaaccccattaatgtttggtatttcatttaacgccgtgcattacaatcaggcaggtgcactggtctatgtgtatatggatggtactgtcgcgattacacatggtggtacagaaatgggacaggggctatataccaaagtacggcaggttgctgcacatgagttgggtttacccatcgatagcgttcgtttaattgcaaccgatacttctcgtgtgccaaatacttcggcaactgcagcatcgagtggcgcagatctaaacggtaaagctgttcaaaatgcctgtattaaaattcgtgagcgtctggcaaaacttgcagccgaaataagtcaaagtgaagctgaccaagtccagtttgaagatagtatggtttcaacagcgaatggtcattcatggacatttcctgacttggttcaacgggcatatatggcacgtgtacaactatgggatagtggtttttataaaacgccagaaattcactatgatcaggtcaaccatttagggcgtccatttttctattatgcctatggtgcagcggttagcgaggtcgcaatagataccttaactggggaaatgaaagtattacgtgctgacattttgcatgacgttgggcagtcaattaaccctgcaattgatattgggcaaattgaaggtgggtttgtgcaagggatgggatggctcacgacagaagagttgtattggcagccgcagggtccacacgcaggccgattatttacccatgcaccttcaacttacaaaatcccgaccagtgtggacattcctcatatttttaatgtcaaactatttaataatcaaaatcaggcagacaccatctatcgctctaaagcggtaggtgaaccgccatttatgttggcattatcggttttctctgcaattcgtcaggcagtacaggcggctattccagaaaatgcaccgctcgtactcaatgctccggcaactcccgaggaaattttacgtgcaattgctattggacggggacaagctttggctgctcgcccacaggctaaaatgtagaagattatgcaacatttacaatggtggactgattttgtagcgtggcaagccgatgcgttgcctatggtattagtcacagtggtccgtgctgatggttcaacaccacgagaggttggtgcaacgatgttgttgcgatttaatttgcaacagcaatggcagcagtcagatacgatcggtggtgggcatttagagtttcaggcgattgatattgctaaagcaatgttaaaagaatcggaaacttgtgtgaggcgtattgaacgctttaacctcagtgctcggcttgggcagtgttgtggcggagtaatgtggttattgtttgaaaaaatattacccgctgaaattgcgtcggatttatctgggagtttgcaagcatggcgagctggaaagcatatatggcgtaatgcctcatatcaatatgcatccacttggcaaacgatggatatggaacaacaaccaagtttcgagtttcattctggcagcagtgaagaatggcaatttagccagcagattcaaccaaataccatgcaagtgctgatttgtggcgcggggcatgtggctgaagcaattgtccgttgtttattacctattggtgtgagggtgaaatggattgatccgcgtgatgatattttcccatccgatttactggaacaggcgtactgtataacaactgataccttagacgccgagatcgaacattttgaccgttcaggtgcagttttaattttaacgcacgatcatcaactagatctgcaactgtgttttacagccttaaaacctacggcaaaaccatttgcttatgttgggatgattggctcaaagagtaaaagggccatttttgaaaaacgtatgcaggtgcgaggttatacttcggaaacattacaacgtttggtttgcccgatcgggatagaagggatttcatcgaaacaacctgcaatgattgccattgcagtagttgctcaattattacaggtatttgatgtaaaaaaatgatcccaaaggatcattttttttgttcgaattttggatttttttctgcacgtttaagcagtacgagaacggcacctgtgccaccttggttttcaggagcacttacaaatgccaaaacatcacgatgttggcgtagccatccgttgacataggtttttaagaccgcttctgggcctttaccatgcacaattttaatgacattttgattttcatcttttgccatctggatgatttgtaaaactgcgtcacgtgcttgttcaatggtacagccgtgtaaatctacagcttcaaaccaacgcatcttgcctgcttttaagtcttcaaaaaccttatgttgaagagtcgcaatgcgatagcttaacgttgcttggcttgcgaccggatttaaagcagcttgtgtatctgatagctcggcatgttcggtatcacgaccaccttcggcagctgcacgtttcgccagagtttgtgcatcaacttttttggcacgtggggtttttacatcggcaatattactattgttgatgggtttaacgcctgcaacagcctgcttaaatagatgtgtgtcttccaattcttcagactcagcctgagattttttagactcaggctgatttgcgattttgcttgaatgaggattggagatttgctttttaaattgcttcaataacttttgttgctctttagaaagcgatgaatctttattactcatatatcttcattaaaccgtttgaggttgtccaaaaagggcagtaaaagcttgatctggacgtggttgtttcataaaactttcgccaaccaagaaactgtgaatatcatgctcttgcatcatacgtacatcatctggtgtcgcaataccactttcagtgatcaataaacgtgaggccggaagtaattttttcaaccgaatagtagtatttaaatctacatcaaaggtttttaaattacggttattcacgcctaataaacattgctcagaaagctttaaggcacgctccaactcttcttcgtcatgaacttcaaccaatacatcaagttgatgctcaaacgcagttttagacatttcttcgagttgctggtcagacaaacaagcaacaattaataaaatacagtcagcatgcaaagcacgtgcttcaactacattgtatgggtcgaccaaaaagtctttacgtaaagcaggtagggcacaatgattacgggcaatcgcaatattttcatctgcaccctgaaagaaatcaacatcggtcaataccgataaacatgctgctccagcttgttcatattgctctgcaatttcggcaggattaaagtctgcgcgaatgattccttttgatggagatgcttttttaatttcagcaatcacgcccggacgtttatgttgtaaagcatttgcaaagccacgcaccggagtcgctgcttttgcaagctcttctacatcttgcaaattacgttgttttaaacgcgcagcaagttcctcatgtttacggtcaacaattttacctaaaatggtattttgaatattaatcatgagaagtccttaatctgcctgagattgttttaatgttttagtaaattcagctaaaacactcattttctctaatgcttgcccgccgtaaataatatcttgagcgaatgcaacagcctgagcataagtcttggtaatgcccgctacataaatgcctgcgcctgcattaagcgcaatcatgtttgcagctttttcaccaatgtcagatttatttttgcttaaagcatctttaatgagctttagactcgccgttgcatctgcgacaaccaaaccatttaatgtttgtgactcaatcccgacatcttcaggattaagggtccattccgtaatttcaccgtctttaagctcagcaatagttgtcggagctgcaagactgatttcatcaagaccatcttttgaatggacaaccatgacatgttcggcaccaagttgtttcatcacttcggcaatcgggcggcacagttcatctgaaaacacaccaatgacaaagcgctttacaccagcagggttggtcagtgggccaagtaaattaaaaatactacgaataccaagttcacgacgtgggccagccgcatatttcatggctttgtggtggtttggtgcaaacaagaaacctacacccatttcacggatgcagcgttcggtttgttgcatatctaaatcaagatgaatacctgcttgctcaagtaggtctgatgaacctgatttacttgaaacgccacggttaccatgttttgcaatggtcgcacctgctgcagcaatcacaaagctagatgctgtagagacattaaataaattttgtccatcaccgccagtacccacaatatcaactaaatgtttgatatcactcacatcgatcttgatcgcaaattcacgcatgacacgtgcagcagctgtcatttcgtcaatgctttcacctttcatgcgtaggcccatcattaaagcaccaatttgtgcttcggttgcctcaccttgcatgatgctgcgcataatttcttccatttgaggctgagtcaaatgaatgttcttggtaatgtggttgagcgcctgttggatattcatagtcatgatttacagcattaatgattaaaatttttaggtgaagttgatcgagtgtgggaggttcggcctattgcgttccatgattcactagctagggggctatgttagcagaaaataaccaaagatttttgctgttcgataagagttttaaaaattttgctcagttagggtatgggtttgagtcataaacagaatttatttattgaaaaaggttttagtttattgtgagtttttatgataaataattaaccatttggtatatcttaaacatcaatatatctagaaaaaatgtgtataaatcaaccaaataaaagtggatatagtagggcgatctttattttgtctattaataaatatgtatttaaataaattgaaatatgtaggggctttaaaaaataagcgctcatttatttttgtatttgttgcactgtttcatccattagaaagctatgcgcaagaaaccgtagagcaaacacaaaaccaagctaaaccagataaagtagttcgtgttgcggtgacaggttctcggatttcaaaagcacaaaaagatggcccgaccagtgtgaccgtcattaccgcagctgatattgaaaaacaagggtttagtaatgcatttgatgcacttaataacttgacgcagaacacgggttttgtacaaggcgccgattatggaaatacttttacacctgcggctaatgccattagcttgcgaggcttgggaccgaatcatactttaactttaattaatggacatcgggttgcagactatcctgtaccttatgatggctctgtcaatttcgtaaatttagccaatattccaactgctattattgaccgtattgaaatattaaacggtggcgcttctgcaatttatggttcagatgcaattgcaggcgtggtgaatattattctgaaaaagaaaacagacggcacacaatttaatatcaaggcaggcggaactaaagaaggtggcgaaaatttacgtttacaactgagtggtagtaaaactttagacaagcttagtctcgtctatgggattgaactcagcggccgtgaaccgatatgggcagccgatcgagattttatgaagagccgaactcgtttaggagaaaaaccagacacgattgtgggtcgtaaaaatgctgatactggtaaatatctttcaattggtggatgtcaggcctttaatggtttatttaacggatcagtcaataatattggacaagcaggggcggacaattgtgccagtggtttggcacggccaacttattggacggttcagacccaaaaccgcagccaaaatggttatctcggtttagattatgagttaaatgataaaactcaattatttgcagattttttgattggggcaaaccaaattgaaaataatacccgtagtccgatatggacttctttagctgcaacgagtggttatttcctaaatcaagattcgggaaattatgaaatttggaatcgccgttttgcacctgaagaattaggtggggtagaacgaataaataaaaaatggaaagaaatttcttctaacttaaattttggaattcgaggcgatattggagagacgagctggagttatgaagcagtctataatggttccatttatactagtcagctaaaccgccaaggcttattacgttcgaatgttgatgaatatttcttaggtcagcaacttggtacagatgcagatggtattcctatttattcacctcacttagatcgtttaagtcgaccactaacagcaagtgaatttgaaagtatttcgggcacaacaaaagaaaaagataaatcgtgggcacaaagtttaaccttaagtgcgaatggtgatgtatttaagttacctgcaggaacggccaaacttgcgactgtggccgaaattgggcgtcaaggtttttcgattaagccagatgaggcgatcgaaaatggtgagttttataatacgagttctagtggagaatatagtggtactcgtacacgccaagcacttggtgcagaattattcttacctttagcaaagccattaaatttaaccttgtccggacgttatgaccgttatgctttgtcagataacagtattgataagctaactttcggttcaggccttgagtttaggccacatccgactttattggtgcgcggtaactacgcaactagttttcgtgcaccagatatgaactatctgttcttaaataagcaaaaaggttatttcgcaagtacgactgactatttacgttgtagccaaacgggacaacctttagataaatgtagctttaaagattacgcacctggggcgaactacactttaaccggaaacaaagagctgaaacctgaagagggtaaatcttatggtgcagggtttgtttggtcgccaaccaataaatttgatatcagcgtcgattactgggatatcaaaattgataatcttgtgaccaacttaagtgcggacaaaattctacgtttggaagcagattgtcgtttaggcaaccaagatattaactctgcagcctgtattgatgcattagcacgtgtggagcgtaaccctgcaaatgcagttgtcgacccaaatgtgattaagaatataaatatcgttccgattaatgctgcatccgaccatacccgcgggattgatttcactagcagatggcgctggaaaacagacagctttggtaactttctctggacgatcaattatagccgtgtactagaacatgaatatcaacaatcaaaagatcacgagaaagatgactatttaaaagatttaagtagtctggattggcgtgaccgttttaataccagtctcagctggagctttggtgattgggcatcaacagtattagttaatcgttatggcaaaattccaaatggtaaccaaactgcctatttaagcccaacgtatttggtgaactggagcggtacttatcaaatctctccaaaagcttctgcttcaatcattattaataacttgtttgacaaagtgaaacgagatgacacaggcggttggccgtattatccgataggatcatattcaccattcggccgtcaaggttggttggagtttaactataaattctaagaatgatgtatggatgcagtgaagtggtacagcatttgctgcatctttttatttaaaactacagaggataaaaccccttatgctggtcaagccttcatttaaaaaaagattgttacttacaacattattatctttatcggcaacacagatttttgcatcgaataacagtgaacaaatcccgattggtaaattacccgagtgggtcgtacccgaatcttatgatttagattttaagattgatcccgcacaaaaaggctataccggtaaaactacgattcatttaaagctggctcaagccacagatcacatctggattcatggtaaatctttaacggttaaagatgtgaatattacatcggcagagggcgtcaaaaccaaggcaaaatatgagcaagcctctgaaatagatggggtgagtaaaattaaatttgccaaaaccttgcccgcaggacagtatcaactcgttctagattttaatgcagcgtatgaccagcagctcgatggtatttataaaatcgagtttgagggtaaaccttatgtgatgacgcaaatggaagcaattagtgcacgccagtcattcccatcatttgatgaaccacgttttaaaacgccgtttaatattcgtttgacgattccaagcaaatattcaggttttgccaatacccaacaaacatctgagcaaatagagaagtcagggtggaaaacactcagttttgcacaaaccaaaccactaccaacatatttacttgcattggctgtcggaccgtggcaattacaaaaagggcctgatattggagcaacttcatggcgtaagcagccgatccagttacgtggtattgcacctgatactaaagctgaaaaaatgcagcaagccttatctgaaacgccagccattttaaaaactttagaagattattttgcctttggttatccatttgacaagctcgacttacttgcagcaccagactttgctgctggggcaatggagaacccggggttaattacttttagagactacttgatgttattagataaggactcgccagttttttttgtacagaattcatttaatgtcaatgcacatgagttggcgcatcaatggttcggtgatgtcgtcacgatgccgtggtgggatgatttgtggctaaatgaatcttttgccacatggatgcaaagtaaaattactcaaaaattacatcccgaatttaatgctgacctagaacgtattacagacaccgcagatgcgatgaaaagtgacagcttagtgagtgtgcgccgtattcgtcaacctattttaagcaatgccgatattcaaacggcttttgatggcatcacgtatcaaaaaggtgcggctgttttaaatatgtttgaaagctatttaggcgaagaaaaattcaaacaaggagtgcgtaattatattaataagcaccaatatggtaatgcgacagctaatgatttaattagcgctttagcagagcagtctggacaaggtgagcgctttactagagcgatgaaaagttttcttgatcaaccaggtgtgcctttaattaacaccgcattacagcaagaaggcaataaagtctttttaaatgtgaagcaaagccgttatttacctgtgggctcaaaaggtgatgcaagaagcctctggggtgtaccgttatgtgtacgttatgaagttccaaatgcaggtagtaaagtgcaatgtgaattggtagaccaagcagaagccaagattgaactcaaaggtgccagccttggcagttggtatattccaaatgcagatgcggcaggatactatcaatttagtttgccacagaaagaatttactcgtctgactgctgctacagaaaagctttctaacactgaacagttggcttatgcctatgcaatttcagctgcatttaaccacggtgatattaatttattggctgtcgtagatgctgcgaagaaatttgccaattcgaatagccgacaaattagtacagcgctgttttcccagttaagtaccattcatcgtcatgtattgaaaacagaagctgaacgtgaacgttttagaaaagtcttagctaatttatatttacctaaattaaatcagttgggttatgtcagcaaaacagacgaatcagctgaagacagtttatggcgtagtgagttggttagatttcttgctctagatattcaagttcctgaagttcgtacccaactgttaaaacagtcagatgctctatttgctcaaaagcagcttaattttgcgcaagtaacacctgaattattgccaaccattttagctgtacgtgtacaagaaaaaggtcaaccagcttttgaccgattgtctggagagttacaacgcgtgactcaaccgacacaacgtcttgcaatacttacagccttgggttcagcaaatcaagaagcaacgcgccaacaagcacgtcagttgattttaaacccgcgtgttaaagttggtgaagttcgtaccgtggtcaactcaatcaatagttatggagatgaacaaggtggcttatggtcttggtttaaagtaaatcatgacgctgtgtttgatcgtttaggtaaatcttcagctgggcgtttccctgcaatgttcagtggggcagcttgtacccaacaacaagcagcacagttaaatgacttttttgcaccacgaactaaagagttggttggggtagaaagaggattgaaacaaaccaaagaacgtattcaactctgcgaatcgctggtagcaaaacaagatgggtcaattgtgcaacagttaaagttgtaattgattcagccataaaaaagccaactgatcgtagttggcttttttattaagggttcttatcaaattactttaaaaacaatctattgacggctgacttatgcgtagatgtctaaaaagtttttaaagatttgatggccatgttggctcaaaatggattcaggatggaactgcacgccttcaacaggaagtgtcttatgtttaacgcccataatttcttccattgagccatctgcttcattggtccagcatgttacttcaaggcagtcaggtagtgtttcttgatcaatgactaatgaatgataacgagttgccgagaatgggctaggaagattactgaaaatacctttattgctatggtacatatcagataaacgtccatgcatcaccgttttggctcttacaattttcccgccaaaagcttgcccaatactttgatggcctaaacacaccccaagcaaaggaatttttccggcaaaatgattaattgcaggaattgaaatacctgcctcgcttggagagcaagggccaggaccaatcacaagatattttggttgccatcgttcaatatcctctaatgtgacttgatcattgcgaactacttttacttcctgattcaactcgccaaagtattgaacgatgttgtaggtaaaagagtcgtaattgtcgatcattagaagcatgatgaacttaacctcatgataattaaaatatatttaataagtgactaaaaagttacccatattgatacctgtttacagaaaaggctttttaggtttgaaaaataagaagccgttttctaatgggctaatatagcaaaaaaagaagtaaccagtttaactatttcattcgctagaaatttgcagaaaaaagggctttaagaggtgaggctttttgaaattatagataactacaattaaggcagaataagcttctattgtaaataaaaaaactattctgccttggtcatacaagaagattaaatcttacgtgtgttataaatcaaccaatctaaaacatcgccagataaatgttcagccagtctttcttgaacagtttgatgataactatttaaccagtctttctcttcatccgttagcatgtcaacgacgatacaatctaaatgaatcgggcaaagtgtcagcgtttcaaattctaagaaatcgccgtaggttttctcaaaccctgagtgaagtctgtttgcaaccagattttcaatacgaataccgtattgtccctcatggtataagcccggctcgttggaaagaatcataccttcacgcaacttactataggcatgaataggtgcgtaataagaaagcacttgcggcccttcatgtacgttaagcgcaaagcctacgccgtgacctgtgccgtggcgataatctaaaccatgttgccataaagtatggcgacaaattgaatcgagtagaggagcggctaaaccttccggataaatcgtttttgccaaagcaatatgacattttaaaaccagagtatagtcacgtttttgttgctctgttggtgttcctacaggaacaacacgggtaatgtcggtagtgccgtctacgtattgtccaccagaatcaatcagtaatagcccatcgccttcaatgaatgagtaatgttcttcagttgcacggtagtgaggtagagcaccattggcattaaagccggcaatcgttgaaaagcttgggcctataaaaccctcttgttgagcacggaaagccgtaattttctcatcaatggtgagttctgaaatgcgttgactttgatgaaatgctttttctaaccagtggaagaaatggcaaagggcaacaccatctttcaccatggcatgacggatatgagctatttcactttcatgcttacgcgatttaaaaagtgtacttgggttgatgtcgtagacaacctgaatatcttttgcgatagcttgctcatgataaatcgatactttggcgggatctaacagcacagatgcattagaaatatttgctaaaaactgagctgaatcttgatagtcacgaatctcaatgccatcagctttaaaagcctgttgggtggttaaatcaactttgttactatcaatgaataaaacagcctgttgagcactgatatataaatgcgaaagaaatacagggttatattctacatcttgtccacgtgcatttaagacccatgcaatatcatctaaagatgaaatgaaatgtccttcaatcgctttagtttttaacgtttcgcgtattgcctgaattttttctttacgagatagggcatttaatccttcaggcattaaatgaatctgctctaaaggaagttcagggcggtttaaccagatcaaaccaattaaatcttgctgtgtttcaagcttaaagccaagttgctttgctgtattttccaacgctttaaattgttggattgaaagtgtttgcccatttactgaaataaccgaacccgccggtagatttttctcaatccatgcgagatgggtagaagattcatcactggtcagtttttgtaactgaaagccagttccagcgagttgctgttcggcttgtacccaatagcgcccatcggcccagagtcctgcaaagttttgggtcacaactaaagtgccaacagagccactaaaaccgcttaaccactgccttgctttccaatagtctggtaaatattcagacatatgggggtctgcactcatgacaaccaaagcatcaatactttgattggtcatgagttcacgaagtttcgctagtttttctggaacagttaagtcgttcatatcgtttccaaatcaggttgaactttgttggtacttttgtccattaatttattcattggtttctttaataaaaataacacgattgcgccaataaccaaggctaatacacagcgcataaataggctaggtaaatgattaataccatctgccgagacttgcccgccaattaaacctgccataaggttgccaagagctgtacctgtaaaccataaacccataatttgactacgtatgacatcaggtgcaagtttggtcatggttgataagccaattgggcttaagcaaagttcacctatggtaagaagaaataaagtaccgactaaccaaaatggtgaaactactccgccatgaatagcaaaatgactggctagagacataagtaaaaagccacctgctgcgaataacaacgcaataataaatttgctgatatagcttggatctttattcgctttacctagcttcgcccatagccaagctgcaactggagcaaagataataataaaaagagcattgattgattcaaaccatacagttgggatttcaaatccgaaaacaatacggtccgtataatcttgcgcaaataaagtaaaagtcgtgggtttttgttcgaaagctgaccaaaatagggcagaggctgctaataaaacgaagcaaataattattttaaatttttcatgttgctctaaattcaggaaaagtagtaaatatgcaaaataagcaataatcccaatgctaatacctacggttaaataggttgcgacagcgacgggattgatgtgaatgataccgaggaaggttagcgcaataacgactgcaactgcgaataaaaagctaaatacaattttaggcgcatttttattttctacaacaggtttgctacagctattggcttcttggcgtagctcattaaatgtttggagctgaggcattgccataaaacggaaaattaataaagcaattaacatcccaatgccaccaataccaaagcctaaatgccagccatggtctttcgccaaaagccctgtaataagtggggcaataaatgaccccatgttaattcccatatagaaaatggaaaaacctgcatcacgtcttgcatcattggctttatatagtgttcccacgatcacggaaatacatgttttaaataatccggtacctaaaacaatcagtactaaacctaagtaaaagaaagattgatcaaatacagatgtaagggcaattgataagtgacctaaggcaataataattgaaccgtaccagacagcacgtgcttggcctaaccagttatcagcaacccatcccccaaaaacggtcattaaatacatggagcctgcaaataatccaacaatcgctgcggcagttggtcgatcaagtgctagaccgccgtcattgaccatcgcaatcatataaagaacgagtaagggtcggattccataataagaaaatctttcccaaagctctgtaaaaaatagcgtttgtaatggtttaggatggccgaaaaaagctttatccgattgttcaaagtcatatttcattattcaaatccttgaatgcttttaagttttttgtaaacataacttttggtttgtttatttataacaaaaatttatgcatatagtttttagtttttttaataataaaagcaagtttggcctgtataaaaaaagtgaatgaaaaagaacatgaatagtaaaatttattttttgctgagtaatgtgagatctactatatgtggtcttattaactgcttagatagcgactaaatagtgcgtttatttagagaaattcataaaaatgaaaaataattattagattttaactaaagcagaaggcatttaactgatggtttaagtcataaatttaagttgctgaaataaaccaaaggaactcattggggaagatcgatgtcaaaggagtgattattttcaagtaatccgataagaatctcagcattatatataagaaagtattatgatcatggacgactgttagaaattgatgcagcggtttatatcagtgcaacaattttgcactaaattagggcaataatgagctatttaaatatgccataatttgaaaatgtgtgaatatggtgcatttacacaagcaaacagtataatgggttcaagacaaggggcctaaagcatgaatacttataagcaattcaatgttttaggtaagtcttataaagttggtatgagaattgcttaataaataccagcaactaacacgcactcaacaagtgcaacaaaatttcattggagcaaaatgagcatggcgaacaaggtccttcaactcatacaagaaagtggcgcaaaatgggtcgattttcgctttactgatactaagggtaaagaacagcacgtaacttacccagctgattctattgatgaagatacttttgaagacggtaaaatgttcgatggttcttcaatcgctggttggaaaggtattgaagcatctgacatgattttacgtccggatgcagaaactggtttcatcgacccgttctttgctgagccaacagtagttgtgacttgtgacgttattgaaccttcaactggtcaaggttatgaacgtgacccacgttcgattgctcgccgtgcagaagaatacttaaaatctacaggtatcggtgatactgcattctttggtccagagccagaattctttgtatttgacgaagtgaaatgggacatcgatatgtctggcgctcgtcatacattaatcgctgaagaagctgcttggtctactggtaaagattacgagtctggtaactcaggtcaccgtccacgtgttaaaggtggttacttcccagttcctccagttgactctgcacaagacatgcgtgcagaaatgtgtgcaaaaattgaagacatcatgggcccaggtcgtgtagaagtacaccaccacgaagttgcttcttgccaattagaaattggtgtgagcttcaatacccttgttcgtaaagctgacgaagttcaacagttcaaatatgctgtttggaacgttgcacatcaatatgcaaaaacagctacgtttatgcctaaaccaatggtaggtgataacggttctggtatgcacgttcacatgtctatctctaaagatggtaagaacttgtttgctggtgatgaatatgcaggcctttcagaaatggcgttgtacttcatcggtggtatcatcaagcacgctcgtgcattgaatgcaatcacaaacccatctacaaactcatacaagcgtttggttcctcacttcgaagcaccaattatgcttgcttactcagcgcgtaaccgttctgcatctatccgtattccttacgtttctaaccctaaaggtaaacgtatcgaagctcgtttcccagacccaatgatgaacccgtacttaggtttcgctgcgttgttaatggctggtatcgacggtatccaaaacaagatccatccgggcgaagctgctgataagaacttgtatgatcttcctccagaagaagaagcaaaaatcccaacagttgctcatagcctagatatggctcttgaagcacttcaagcagatcacgaattcttgttaaaaggcggcgtgttcactaaagaaatgcttgatgcatacatcgaacttaaaactgaagatgtacgtcgtcttaacacgactactcacccagttgaattcgatatgtactacagcctgtaatacatacttcataaaaaagcctgcttatgcaggcttttttattgcttggaatgttgattgaattctctacgttttttatcaaaaaattggggtaaactaggtgcgagttttcatgtgagcagattatgcgtaaacgacaaccagtacttaagcaggaaaagactttaaatcctgaattgaaaacatggttgtatgcgtctggttctctgacacaacaactcactgagctgggtggtgggaagttcagcgtaaagcctttcaaagaacatttccagcgtttaacttttgccgacagtcaatggatgaacatgccccatactcacacttcttgggtaagggaaacctatttatatggcagtgatgtagagccttgggtgaaagcaaaaagtatttttccaattcaaagtttacaaaaaaaagcccgtatatttcagcatattggttctaagccgataggtctttttttatttcaaagaacaacaccactttgtgatcgccgggttattcgtttacctgaaggctggacgcgacaaagttgctatacttggcatggatgtaaatttattgttcaagaaacattcttaccggcttttgaagcttttttatatcagcagcacgacaaggaattactatgacgactgcaacaggtacaacatggcgtcagcgtttagaagcttattattatctatgccgatttgataagccaattggtactgaactggtgttttggccaaccatgtgggcactttgggttgcatcaaaaggaataccgaatttaggtattttattcgtcatgattttaggcgtcatttttatgcgcgctgctggatgtgccattaatgactttgctgatcgtaaagtagatggtcatgtagagcgtacaaaaacacgtccgttagcaacaggggttattcgagccagagaagcagtatatgtattcttgggtcttgttttagcaagtgcatgtttgttgttctttttacccatagaaactttctactggtcatttggagcattatttttagctttcatttatccatttatgaaacgctataccaacttaccgcaagtttttttaggagcagcattttcatggtcaattccaatggcctttactgcggtaggtaaaactccggatctgacttgctggttgctctattttggtaatttggcttggacagtggcttatgacactcaatatgcaattacagaccgtgaatatgatttaaagattggtgtgaaatctacagctattctttttggtcgatatgacatccagattattgcgcttttacaagcaataagtcttgttttgattggtacagcgctatatttagaaaatatcttatttccttgggccattattgctttagttgtagtggcatttgattttatatatcaaacaattaaaaccaaagaccgcaaccctcaggtatgtttttgggcattccgtcacaatcgttgggttggattaatcatttttctaggaatatttttaaatttcatatagtaaaaatgaccgtgaggttgaaaagtgttctatgcagagcactttttttatgtcttaatatttgtgcatgaaaaatatgcggaataaataacacataaaaaggatattctatgaaacggtcaaaaattgctttagctataacattatcaatttcagcattatttcttacagcatgtaatgacgatgatgatgactacacagggatagacacaaataaagcttatgtctcagaaagtaattacgcaattgataaagttgataatgcttcatcaattaaagtaatgacttataacatggcaaatgttcaaggaaaaacagcaactgctacagcaatggtattgtttccaaaagcaacacaaccgaaagatggttatcgtgtagtagtatgggaacacggaactgttggggtgggtgatggttgtgctccaagcaaaaatgctattaatccgcggtttaaaatccttgctgagtctttattagcagcaggttatgtgattgtggcaccagattatgagggtttaggcaccccaggggtacatccgtacttaaacttatctagcgaagcaaaatcagcattagctgcagttaaagcagtaaaagagcattatggtgctcagttaaaaggtgattggatgtcgattggtcagtctcaaggtggccatgcatcattggggactgctgaatttgccaatacggatgcgagttataaaggtgcggtagccggagcacctgcttcaagtttgggaacaatcattcaaatttatattgatccgcaatttaatcttgattcaaacggaaaacctaaagaagtaaataaattggatgaaaacttgctgcaagttcgttatgcagtggctaataaattgattacagaagctgaaggtcaggcgatgattgaccaaattgctgatggttatgctgaattattagcatatgcagccttggcaagtgcgggtattaaagcacagcaaccagactatgatttgaaggcaatttttacgtcaggagcgggtgatattgcagaattggcttatggtcgtacaggggatgatggtgcttgtttaagttaccctacacctgataatgcaaatggtttacaagcgaagtttaaggcgggtattttagcttacttggcagatcctacccaccaaattgcacagtatggtattgatctaagtaaatttaaagcggatcaagtcgttcaaaactttttgacagcaactcaacctgcaacaaatgctacagccgagaaagttattaaaacaccagtatttattattcagggcgaaaaagatcaagcagtattaccagtagtaacacaaggcttatttgccaatatgaaagcgaatgctttgaagtttttccctcaagcaggctacgataaaggctatcaattaacaattgtaccaaatgcaactcatactcaagcaatcgtatgtcaaaatgccaatgctgtagattttattcaagctaaaatgtcagcgggtacaggtattgtgttaactgatgcgcagaaagatgccagccaaagccctcactgtacaggtaaattttaagacctatttacttgattaaaattagttttaaaaaagagtctctttatagaggctctttttgttatattgttacgcattctgaaatcgatattatttgagtttgaaggacttatgagccagcaatctgttgaaaaaaaatctgttccttggttattaatgggattaggtttacttattccttttctgattattggaatactttttttggctgcaaaaagtgatgctcagaataagaaacaatatgaacagcagcgtttagaaatggaaaaaagaatagctgagaaagaaactgccaattctgacaagaaataacagtagtttttaataaatatctttttgtagctggcgtacactcgggatgtttgtatagcgtcttacgatataacctgcctctatgagcatttgatcacgaagacgatcttcttcgactttctcaaggtgagtagggtcatctagctcaataatggctattacttccatgttttcatcaagcaaaacaaaatcagtgactttacggttgaactgactacggaccttataatcattactggttattaatgcgctaaaagccacttgtgctaaaacatgataacttgggaaactttgttttaagcgtataaacatttgagtttcaaaattagtaataacaggacgggcaaaaaatttttgttttggaaataaataaggacgtaaacaaacaagaagaaaaatacaggtgcttaagcaacctaaaataataaaaaataagtgactcgattcgaacatgtgaagacatcatacaaataaaaacccactcataaggagtgggtttttaagaatcttggctctcccacctgggctcgaaccagggacctgcggattaacagtccgtcgctctaccgactgagctatgggagaatctggaaagggattttaggcaggaaagggggcgaggtcaagggttaataatggaattagtgagaatatctaactgattggtttaaaaatattcgaaacattgattttattcaaaataatagaaaaatattaaatgattagaaaagaaaaagcccacaatgaatgtgggcttttagaatcttggctctcccacctgggctcgaaccagggacctgcggattaacagtccgtcgctctaccgactgagctatgggagattagtagatggctctccaacctgggctcgaaccagggacctgcggattaacagtccgtcgctctaccgactgagctattggagaatctgatgcgcattttatggatgaaatctaaaagcgtcaataagaatattaaagaaaatgaatcgtttgcttgattaatatgcttttgttgtactaaaaataaaaaaccacccaaaacagggtggttttttataaagaaataaaattatttctctacaccagctggttggcctgcaagttttgcatttgcatagtcccagttcacaaggttttctaagaaagttgcgatgtatttaggacgtaagttacggaaatcgatgtagtaagcgtgttcccatacgtcaattgttaatacagcaatttgaccatgtgcaagtggagtgtctgcattagaagttttagtaatagaaagtttaccgtttacttcatcagcaactaaccaagcccaacctgaaccgaattgagttgttgcagcagcagtaaattcttctgcaaatttttcgtagctaccaaaagcttcgtcaattttagcagcgattgcgccagtaggcttaccaccaccgtttggcttcatgctgttccagtagaaagtgtggttccaaacttgagcagcattgttgaaaataccagctttagatgcatcaccagcagttgccttaatgatttcttctaaagttttaccttcaaggtcagtacctttgattaagttgtttaagttaacaacataggtattgtggtgtttgtcgtgatggtattctaaagtttctttactgatatgtggcgctaaatcatcatagccatatggaagtgcaggtaaagtaatggttgtcatgttcctattccttgcatttgctgggttatacaattaagtggctctattgtaaatgattctggatgcaatagggcagccttttaaagaactatacacaataaagatctaattaatacgcataacacagattgaaaaaaagacttaattaaatcggattattcaattcaaaatattcactttcaatagcaaactgttttgaaattgcttgtgctaaacgttgaaccccataacgttcggttgcatggtgaccacaggcaaaataatgaacgcctaattcttttgcttcataaaaagttcgttcactgacttcgcctgaaatataagcatcgcaattttgtaaagcagctttagcaataaaatcttgagcaccgcctgtacagaagcccactttttgaatactttgtttttcagccggtaaatggatcactttaaaatcaaaactgttttgtagttttgctttaaattcctctacaggaagcgcttgctctaaataaccaatattaccaattggatgtttctcggttagatcaagtggttctaaattttgtaagtttagtttttctgcaatagcgatattattgcctaaacttggatgtgcatctaaaggcagatggtaagcgactaatgagatattattttgaataagtttttttatacggttacctcgcataccagtaattggatatggttcgcctttccaaaaataaccgtggtgtacgagtaagagatcggcattctgagcaatggctgcatcaattgcatcttcagaagcagttactgcacaaagaatacgttttacttcagttgaaccttcaatttgcaggccatttggtgcgtaatctttaaattctgctgcttttaaggtttggtcgcaccactgaataatttcatgcaaatttgccatgatatttcctgaattgagtagtaaaagttgctaaagctatagaaacatattttgttgtgtaactaaagctagacaaatcttttttgacttttttatgtatatcgacatatttaatttaaaatgcttaactgaaaactctttttgttcaatatattaatttaattaaaaacttctttgcgtagaggatatgaacgtgcgccgcacctttacatggttaccttgggtgttacttattattgtaattgccagttttattgcatggcaaaaataccatcagccgaaaccaactgttgcagttgatggggtgcaaatgccagctgagaaagttgagccactggttgatacttctcgaacgggcggggtggtgtcttatagtgctgcggtaaaagttgcagcaccagcagtagttaatatttttacgacccagaaagttaaacaaaatcatcctttattaagtgatccggtattccgtgaattttttggaaatcaggttcctgagcaacaacagcaaaatgaaaatagtttaggttcaggggttattgttcgcgccgatggttacattctcaccaataatcatgtgattgctcaagctgaccagattgtggtggcattacatgatggacgccgagcagaagctacaattgttggcaccgaccctgatacagatttggcggttattaaaatcgatttagataaattgccagtattgccttttaagctcagtggtaatgaagttggtgatgttgttttagcaattggtaacccatttggcgtagggcaaactgtaactcaagggattatttcagcaaccggtcgttctgatttaggtattaatacctatgaagactttatccaaactgatgctgcaattaacccaggtaactcaggtggcgcattaatcgatgtggctggtaacttgattggtgtaaatacggcgattttctcacaatcgggtggctctttaggtattggcttcgcgattccggcaaaggtttgtcagcaagtattaaactcgattttaaaagatggtcgtgttgttcgtggttggttgggtattagtttacttccacctacacaagacgatgtattggcacctaagcagcaagtaggtgtagtggttgctgatgtcttaaaaaatggtccagcagatgctgcaggaattaaagttggcgataaaattgttcaggtgaataatgagccgatcacttcagcttctcatttaattaattatgtcgctttgcaagcaccaaatagcgaaattaatgttctggttgaaagagaaggtaaacaacaaaactatgttgtaacggtaggtgagcgaaaagcacagaatacacaatctcagtatattccgcttccaagacgttaaaacctaaataaaaaaagcctcattttgaggctttttttattgttgttcattaggagtgactaagactttgatgctgatttttaaattcagctaaagcttcaattcgatattgaataagcatttcaccaatttcagcacccttaatgttctctggtaaatcttgaactttaatggagcgaacaatttgcattgcttcacgcatgtattgagcttgaggatatggacgatcttctagtcctaatctgccttttgcatcacactcgcaggcttgtacaaaagcttccactctttctgggcgacgtaaaacatctaagcgttgcaatagacgccataaagtaccaggtttcaaggacataatctgatgacattttaaatgttctttacaaacagataatgccaattgtttggtctgtgtcggaactcttaaacgttcacataattgggtaactggcttaattccacgttcttcatgcatgatatgacgaggaagttcttcagctggagtgagggccttaccaagatcatgcactaaaacagcgaaacgtacatcaagcgagtagttcgacttacaagcttgctgtaatgacattaaggtatgaatgccacaatccacttcaggatgatattcggggcgttgaggcacaccgaataaagcatcaatctcagggaaaagatgttttaaagccccacaatcacgcaaagtttggaaataaatatcggcatgattttccattaaagcgcgtgaagtttctttccagacgcgctctggtgttagtgcatcaagttcacctgaatctgccatggtttgcataagttgcaatgtctctggcgcaatttgaaaaccatatgggaaatatcgggcggcaaaacgcgcgactcgcaatacccgtaaagggtcttcagcaaaagcttctgaaacgtggcgcagaattttattttctaagtcgttttgaccaccatatggatcatatattttaccatcttgatccattgcaatcgcattaatggttaagtctcgacgaattaagtcatcttctaaactaacggttgtatcagtaaagaattgaaacccgtgatatccctgtccagactttcgttcggttcgtgcaagtgcgtattcttctttggtttcgggatgaagaaacacagggaaatctttgcctacaggttgaaaaccttgggcgagcatgtgttccggtgttgcaccgaccacaacatagtctttttcttgatagggatgcccaagtaaataatctcgaacagcaccgcctactaaatacacttgcatgaaaaaacctctattcttcaagcaatcatgctacagaatagaggttttctcaagtcattagaaaggcttttcgtaaaaagcggtttctaaattacttttcttgctgttgaatttcagcaactgttaaagcagtcatattgataagacggcgagtcgtcgctgtcggagtcaaaatatgaactggtttagcagcacctagcaaaattggaccaattgttacgttgttaccagaagttgcttttaacaagttgaacgaaatatttgctgcatctaggttcggcataatcaacaagttcgctgaacctttgaaacgagaaccagggaatgcaaaatgacgaatattttcgtctaatgctgcatcaccatgcatttcaccttcaacttcaagctctggagcttgctcagataaaatacgataaacttcacgcattttttgagcgcttgaatctgtctggtcactaccaaagcttgaatgagaaagtagcgctacacgtggtgtaataccaaagcgacgtacttcttcagccgctaaaatagtcatttcagcaagttgttcagcagtaggattagtgtttacataagtatcagcaataaacaagttgcgatcttcaagcattaatgcattaagcgtgaagaagttgttcatgccttctttaagaccaattacattgcgtacgaagtcaaggtgaatgttatagctactgtaagtaccacataacataccatctgctttgccaaacttaactagaagtgcagcaatgagtgttgaacgacggcgagcttcacgttgagcatattcaacagtgatgcctttgcgttgcatggtttgatagtagtctttccagaactcttcgtataacggattttgttcttgatctacaatctcgatatttacgccgtgttgtaaacgtaagcctaattttttgatgtttgcttcaatgactgctgtacgaccaactaagattggtttagctaaatcttcatcaactgcaatttgaacagcacgtaatacgcgctcatcttcaccttcagcgtatgcaatacgtttaggatctgtttttgcttgagcaaagattggtttcatcaagaatgctgagttataaacaaactcagaaagtttttgacgatatgcagagaaatcttcgataggacgagttgcaacacctgagtccattgcagctttagcaacagcaggcgcgatttctaaaatcaaacgttgatcaagtgggcgtggaattaagtagtcacgaccaaatgaagcagatttttcaccataagtcgctgcgtcagcttctacgtgagccatacgtgcaattgcatgtacacatgcaattttcatatcttcgttaattgttgtagcacctacgtcaagtgcaccacggaagatataagggaaacataaagcattgtttacttggttcgggtagtccgaacgaccagttgccatgattacatctggacgtacttcatgtgcatgttcaggcagaatttctggatccgggtttgctaatgcaaagataatcggattttcagccatttgtttcaccatatctttggtgagaataccagcagctgaaagacctaagaacatatccgcgccagccattacttcatgtaattgagtcgctttaatgtcttgtacataacgttttttcgattcatccaagccttcacgtgaagttgtaagaagaccacgagaatcggcaacaatgatattttctttatttacgcctaaagcacaaagtaaatctaaacaagaaagggcagcagcacctgcacctgaagcaacgattttgatttcttcaattttcttattaacgatttgtagagcatttaataatgctgaacctacaataatacttgttccgtgttggtcatcatggaacacaggaattttcatgcgttcacgaagtttcttctcgatatagaaacattcaggtgctttgatatcttcaaggttaataccgccgaaagttggttctaatgaagcaacaatatcaacgattttatctggatcgttttcagcaatttcaatatcaaatacatcgacaccagcgaactttttgaacagaacgcctttaccttccattaccggtttagaagctaatggaccaatattacctaaaccaagaaccgcagtaccgttactgacaacagcaaccaagttaccacgcgctgtatattttgcagcagctgaaggatcacgttcaatctctaaacatggagcagcaacccctggtgaataagctagagccaaatctcgttggttgacaagttgcttacttggcgtgacgctgattttccctggatttggatattcgtggtaatttaaagcggcctgttttaaagattgatcgtccatctgagtctctattgatacaaaaaagcaaactagtcaagttgctcacaaaggttggttatttatctgcttactatgtacaaaattatatcaagtaacataataggtagacgaatggccaatagcctcatggtgagctaaatgctaaagaatataacactacttctctatttctcacagtcaaaaacgctcatttttggaaaaaccagcgcatgtaaaatagactgttaaaacaattatcaaatatgcgtatttgtttgtagatattgaagaatctgatttggatgaagtggacggctaaagaaaaagccttgtaaaaaatcacattgctgcttttgtagataaataacttgttcttcggtttccacaccttcagcaactagttttaatcccatgcttttacccatcgcaatcatcgcattcacaattgcttcttgtttttgatcaccgattttcgaaacaaaggcccggtcaatttttaaaacatcgattgggtattctgttaaataagctagcgatgaatatccagtgccaaaatcatctagtgcaattgaaatattacgttctttaatggagtgcaataatttttttacattgtcagtattatctaataaagcagattccgtgatttctagttctaaatttgaaccatcaagatgatatgtgtctaaaacttcgtctaaatcactgagtaaaagacctcgatgaatttgttgagcaacaatatttacagaaactcggacatcggcgtagcctgcttttttccattcttgtagctgtttgccaactttatctaaaacgactttaccaatatcggaaataaggctactacgttcagcaaaaggaatgaacatattcggcataactaaccctttttcaggatgctgccagcgaatgagtgcttcaaaacctttaatcgatttgtcatttaaattaatttttggttggtaatacaccacaaattcatcattttgaatggctttacgcaactcttgttctaagtctgctgttttatatgggtttgtagttttattacagtaatagctgatagtattgccacctaaacgttttgcttccgacaacgcttgttcggcatgattgttgaggtgatcaatttgccggccatgctcagggaaacaagcaaccccaatagaagctgtaatgaaatattcttgttcatcaatataaaaaggcgcatttaaagcttgtaatatattttggcaatattgctcaatgttgggatgaataggtgatatttcataaataattgcaaaatcatcgccgtttaagtaagccactaaaattgcattgatattggtcagtcgtagtcgctgtgcaaattgtttaagtaactcatccccactatcattatttagaaactcattaaatgctctaaatctatcgatattaatacgtattaaagccagatttttaaaactataagatggattaacaagatattgatgtaattgattataatagtaaaagcggttagggaggtgagtcaaactatcatagttttttaaataagataaatgctgctcttgtcgcttttggtcggttaaatcacgtgcaaaaccaatataattaataatctggttgtactcatctttaactgcattaatatgaagccataaatagacacttttacccgatgtaaacttttcatcaaattggcccatatattcgccagtttttagaagttgttgagtaatggagtcgtgaaattgttgttgctgtagcttctgatttattgtgatattaaatagctgctgacttaataattcagattttgaaaagccagttaatttctcataataggggttaacttcaatatagttgagtttttcatctagaataaaaattccttcagctgcctgctcaagcacaatcgcagaaagtctcaaatgttcttgatcttttttttcctgatgaatatctctggtcattccgaccatacgtaaagctttattggttttaggatcacggctaatgacacgtcctacgtcatgaatccaacgccaagaaccattacgacgtaaaatgcggaaggtaatattgaagtgatcagattttccttccaagtgttcttttaaacgttcatcaaataactttcggtcattgggatgaatgcgctctaaaattgacttgaggtgtaaaggagtattttgagtttgtttttgttgatcaaaaaacgttatttctaatttttgtttctcaatatcccaatcccacggtcggatacctgctgtttcatgtgcaaatgctaaattatgatgatggctttcaagcctctcattcattttagtgaggtcatatgtcctttcccgaaccttttgttcgagcaaatgattattaaattgaagctgtgcttcaatatctttagatttatttacttcttgttggagctgtacacataactcttcagcccattgagtatgctgttctgctacttgaacaagttgtttatttttaaataatagttgagaaattttttgatagttacgctgagttgcataagcacaaagcaaagttgcgacgaaagctaaattataagcaaagtaaaaggggagttgggtgatttgagaatgagtaaactgtccaataatgagtgggactgtacttggaataaagagtaaataaaaatatcgaggttgttgagttaaaaatgtaagaccaataatgtgggctgaggtaataaataatgctatgaggatatgaacatcagaaacagatattaaagtgtcaggaagggaaaaatgcagaacaatgatattaattcccattaaaattccagacgtcaaacaaatgccttgtagcattaaatcggttttcttaatgaaatgaatatcacgataatgtgttaatagctttgggacaaataatagacaggtaagcgttaaaatagtaaagccaattgaccaaataaagtttgtaatgtaagaagtaaagtaacaaaagaaaataatagctgaaattaggcacagtaaaattaggctaacaagataccagcggatatattgaattgagaggcgaagctgctcaatttttgtttgatgctgtaaatattcttcctgaaggccagacataagatttttctatcctatttttttacatttatacagaaagaatctgatttatcagtggaaaaaaatttaaattaatattcatatcgtaaaagtaagttaactttaattgttgatttaatcaatgttcaataagtttatatggataaaaaccgataatttaaaatagataatgctacaacaggtgcagtttcagtacgtaatacacggtccccaatacaccagttcataaatccagcttgattggcttgcgtaatttcattttcacttaaaccaccctcgggaccaattaagagggctagttcaggttgtatccctgccaatacatctttttgttctttttcaggagccaaaacaaatttagatgtaggaaggtcggatgagtttaaccattcatgaagagaaataggtgctaaaacttctggaactaaattgagtccacattgctcacatgctgcaattgcaacagcttgccaatgatctaactttttttgatcgcggtcgtatttcaaacgcatttcgcaacgttcactggtcaagagctgaatcttactgacaccaagttcagttgctttctgaatggcataatccattcggtcacctttactcatgacctgaccaagaatggctttaaatggagcattacggtttacaggattaaaattctcaatagtgacaaacgcattttttttattaatttcggtcaatgtcacgagatactcaccaccttgcccattaaatagtgtagcttgttcttgtaattgtgcgcgtaaaacacgtacccaatgatggaagactgattcagttagttgaattgttgagccaactgtaagttcagtttcgataaaaaaacgattcattgggtacgccttacaaaattaatttaaaccaaggtcaacaacaagctgacgagttggttcgacttggttcattgagtaaaagtgtaagcttggtgcaccacctgcaatgaggcgttcgcatagcttaacaacaacttcatgaccaaaagctttaatactttcactgtcatcgccataggcttgtaattgcttacgaatccagcgaggaatttcagcaccagtaccatctgcaaagcgaattaaattacttgcattggtaataggcatgataccaggagcgactggaatgttaattccagctttttccaaacgctctataaaataaaagtatgagtctggattaaagaagaattgagtaattcccgcattggcaccagcttgtactttttcaataaaacgttggatatctgagtcaaggctttcggcttgaggatgcatttctggataagccgcaacttcaatatgaaaatgatcacctgagtgctcacgaataaaacgtactaaatcttgagcataaggaagttcgccaagaccaacctgtccagatggtaaatcaccacgtaaagcgacaatacggtcaatgccttgagctttgtataaatcgagtagttcagcaatacgcgtcttatcatcaccaatacaagaaaggtgaggggcaacaggagtgcctttaccattgaaatcttcaatagcagcaagtgtgcgttcacgagtagaaccaccagcaccataagtaattgagaaaaactctggatttaattgctgtaattcttggtgaacaatacgaagtttttcagcaccggcatcagtttttggcggaaaaaactcaaaagaaataggtgtacgtttagtcatgtcaaatccttgtaaacagcgaaacatttttagaaaaaagggcagtcggttcaccgtctgcccttaagttcttagtatttgtaagcgtcagatttgaatggcccctcaacagcaacgcctaaataatcagcttgctcttgagttaactgagtaagtacaccaccgaaacctgcaaccattgcagcagcaacctcttcgtcaagtttcttaggaagaacttctacgcgaatttttgcagctttttcacttgcaggtaggtcggcaaatttctcttggaataagtgaatttgacctaaaacttggttagcaaaagaaccgtccattacacgtgatgggtgaccagttgcattacctaagtttacaaggcggccttcagaaagaaggataagatagttgttttcgtcttctgaacgataaacttggtgaacttgtggcttaacttcaacccacttgtaaccacgtaaataagccgtgtcgatttctgtatcgaagtgaccgatgttacatacaactgcaccagcttttaagctgtctaacatcgctgcatcacacacatggtagttaccagttgttgttacaataaggtcagtgttgccaagaagatcgtggttaatatcttcttttttacctgtttgtacgccgtttttgtatggagatacaacttcataaccatccatacatgcttgcattgcacaaattgggtcaacttcagttacacgaacgatcatgccttcttgacgtaaagattgagcagaacctttacctacatcaccgtaaccgatcacaagcgcacgacggccagataaaagcatatctgttgcacgtttgattgcgtcatttaatgagtgacggcaaccatatttgttgtcgtttttagacttagtaacagagtcatttacgttgattgccggtacttttaaagtgccgtctttccacatttcgataagacgttgaacacctgttgtggtttcttcggtaataccgtgaatgcgctctaaaagtgcaggatatttttcatgaacaagagcagttaagtcaccgccatcatccaagatcatgttggcatcccaaggttggccatttacattaatttgttgttcaaggcaccatacgtattcttcttcagtttcacctttccaagcaaaaactggaataccgcgagcagcaattgcagcagcagcgtggtcttgagtcgagaagatattacaagatgtccagcgaacttcagcacctaattcaacaagcgtttcaataagaaccgctgtttgaatggtcatgtggatacaaccaagaatttttgcaccagcaagtggtttagacgctgcataacgtttacgtaagccgatcaaagctggcatttctgcttcagcaagtttgatttctttacgaccgtagtcagcaagtgagatgtcagcaactttgtaatctgtaaatgaagcattaaccgcgttcatcaggatctcctaggaaaaaatagtattgatcattctgttcgcggatgccgttgttggttaaaacgactgtttaaccgatcgtcgagcctggcaaaatgatctttagtgccgatcatttgtcgcagcatccctcgactagcgaaacattgtacttggaaaagcttttagtgccaatccagttttgtttattatctgcgtaattacgactttagatttaaattatggccttaaatattcccgaatctttggcaaacctcgaagcgaactgtggcctttttgcagtttggatggtacttcaacatcatggagtacaaattgatgttgctgagctgattaaagtttgccgctatgacgatgaaggaacttatacgattgctttagccgttgctttaaaaaagttgggctttgaggtgtcatttcactcagatcatgatcctaacattagcccaagcgaacgcatgagctataaagaagcaaagatattaaaaataccaactgggccagcgctgagctatcaagatattcaaacagagactcaaaatggaaaaatggtgattgtgtactacgacactttagaaggggtagggaatcagtcgctcatttattctatagatcaaaatgaaatctgcttttttgatagttttgagccgatgtcggcagcagtttttgagaatcaacgtaaagcagaaggtatttgccgtcaggctgtcgtaattggtgaccgtaatttaaatattcattcgactaaattgaattaaacttaaatgagccagtaaagtgctggctcatactgaagttattgttgttgatattcttgaatgacttctaacgcagcccggaaagcttcctgagtagcaggggcaccgcaatatggcaggctatgcaataaagtttcctgaatttcttcaactgtacaaccattgttgagtgcaccacgaacatgacccttgagttctgttggtgatttgagtgcagttaacattgccaaagtgattaatgagcgatatttacgtggcagcacaccttcacgttgccaagtcgatccccatgcatgttcattaatccagtcttgtaaaggctgggtaaagggcacggtattttcttgggcacgttttacaaaagcttctcccatcacttctgtgcgtacttttaatccattttcgtaatcttgcttagacattaatttctcctaaaaataaaagcgtcgagtgacgcttttatggctgtttattaattaatgcgaatcaaaaatgattgcaatagtgaattagtggaggcatcagtcacactatttgatgaggatttgataaaggcaggactttatttagcttttcatcaaaaacatcggtaagcatgctatcgaatcgaattgcgttgtactgcaataattgttgagcttcgctttcagaaataaagccttcttttatcgcttgagcaatattctcttcaaaagtaagacccgtaaacttgcctttggattcagctttcttaaacttatcccaaagcggttcaatggttcttaacatttggaacgtgtgctctagacggccagtgacatcattaggttcagttgaatagtacacatggcgtttgagttgctctctaaacggatgttcttccatcatgagttcagcaacttgttgttttaactcatcgtcaggttttgaaatcacacgacctaacgggaagcatatccatttgacaaatgctgctggaagcttggctgggaagttgtcaaatagtccccaaaatgcttcctgaatattcaagaatgctttttgcagtgctagtttggcatgaagttgttcagcttcagttttttgtccagcctcataatattttaaaattgcagtggcaataaacaagtgcgcgtgaatatctgccaagcggcctgatagcatttctttacgctttaggtctcctgcgagtaatcctagtgccatatcggaaacaagtgaaaaattggcgctaaaacgattgatggttttatagtagcttgcagtgaattgatctgctgactgaggcgcatcactcgaaccacctgtccaaccataagcaaatgatcttgcaccgcggttaaaggtataggctaaatgtttaaacaacaaatcatcgaatttttgtacggcattggctttgtcgtcagactgaagtaattgcaattcttcaaaaagataagggtgacagcgcattgagccttgaccaaaaatcatcaatgagcgggttaaaatatttgcaccttctactgtaatagcaattggaatcgcttgataggtgagagcaaggaaattgcgtggcccaagttgaattgcacgtcctccagcaatatccattccgtgattaaccactttacgcatcgtttcagttgcatagtattttgccatggcagtcattacagcaggggttccaccttggtttagaccacacgtcactaaataacggaatgcttcaagcatataggcatcgctggcaatttcactgcttgcttcttgtacaccttcaaatttgccgacagaaatattgaactgttgacgaattcttgcaaaagcaccgacagtgagatagctcatttcacctgcggccgtggctaatgcgggcagtgaaatacctcggccaacacctaagcattccatcagcatgcgccagcctttaccagcattttcttgtccgccaataatccagtcaattggaatgaagacatcttcaccctctactgtcccattcatgaatggagagcccggatagtgtcgtgcacctatttttacgcctgcatgattggctggaattaaagcacaggtaatcccgtactcagttttagtcttatctccaagtaaaccttcggggtcataaagtttaaatgctagaccgaccactgtggcaattggagcgagcgtaatccaacgtttagagaaattcatgcgcagcccaagaacttgagcaccttcatattcgccatagcagactacacccgaatctggaattgcacctgcatctgaacctgcttccggactggttaaaccaaagcatggaatttcttcacctttagcaagtcccggtagatattgctgcttttgcgcatctgtaccgtaatgcatgagtaattcaccgggtcctaatgagttaggaaccatacaactcaccgcagcagttaatgaacgcgaggcaattttgctcataatgcgactttgagcaaatgagctgaactctttaccaccaaaggattttggaataataagacccaagaagcctttatctttaatgaactgccaaacttcaggaggaaggtcttttaattgatggtgaatttcccattcatccagcatgctacatagcacttcaacttcattatcgataaaactttgttcttctggtgaaagtgtaggatagggatatttttcaaattgcgaccaatctggagcccccataaataactctttttcccaccagcttgttcctgcttctaaggcttcttgttcagtggtactgatgctcggcattgagttggccagagttttatatgcaggttgggtaattaagttaaaccgtaaaggtttaaacaaaataataatgctaagtgcaataaggggaatccctaaaagtaatgcccacggcgttaaaatgaaagcagtaagtatggctacagcaatcgtaataacactaccagtgactctatttaggttaaaaaagaaaattgcccatattgcaacaagctgaatgacaatacttaaaacaaagagtaggaaaatcatacttgctccttgctagataagccctcaagttagaaataataaaaaagcgaggagagatttaaggcttaactagcgaattttttaatgctgtttaaatttgattttttatgtcgcaattgatgtatatgctagagcagggatatatcgtgcttttaagtataaaatatttttgaatgaaagtgtaatggcttgttttatcgatttgtcaagaaatgttattgattttcttgtataaataaaaaagccctcataatctgaaggcctttttaatacttatgaagtgttaagcttcgattgcttgtaccgcaatttttttcgcaggatctaccttgcgacgaacttcaggaacaggttcaccatagtattggcgatcagcaaaatagcttgaacgaaccattggtgcagaccaaatatttctaaagccaagtttacggccatgctctgcataacgttcaaattcttctggtgttacaaaacggtcaattggtgcatgctgtttagaaggctgcaagtattgaccaatagtgacatagtcgacatcgtgagcacgtaagtcatcaagcaatgcaatgacttcttcttcagtttcaccaatacccaccatcaaaccacattttgttgggatgtctgggcagtattctttaaacatttttaataggtttaaagagtgctgataatctgaacctggacgcatcgctttatatagacgaggtacagtctcaatgttgtggttaaatacgtctggtggacattcggtcataatgcgtaaagcaatatccatacgtccacggaagtctggtactaaaatttcaagtaatgtatttgggctaagtgcgcgagcttctttaatacagtccacaaaatgttgtgcaccgccgtcaagcaagtcatcacggtcaactgaagtgattactgcatatttgagcttaagattggcaattgtctctgccatgtggcgtggttcatcagggtccaatgcatttggacgaccatgcgctacgtcacagaaagggcaacgacgtgtacaaatatcacccatgatcatgaatgttgctgtaccaccgccaaagcattctggaaggttaggacaagctgcttcttcacaaacggtatggagtttttgagcacgtaaagttgttttaatacgctgaacttcttctggtgccgtcatcttgacacgaatccagtcaggtttacgcggcacttcaaccgtaggtacaacttttacaggaattcttgcgactttttctgcgccacgaagttttacaccctgttcaggtttacggtgttctgacatatttaacttttccactcgtttatagagacattgacattgtattatagcggacttctacaagtaatagcggaaaataactattcatataataaatgtggctattcagaaatatagggttgagaaatacataaattcaccgcatattagccataatttattataaaatatggtcattcaacagaggaaggagctttcaatgccacgtaaaaaagaggtcgttagtgggaatttcgttaagtacgatgcggtagttctcggttctggacctgcaggtgaaggcgcggcaatgaagcttgcaaaagctggtaagcgtgttgcaattgtagatgtacgtgatcaactcggtggtaactgtgcacacgtaggaaccattccaagtaaagcattacgtcaaacagtttctagcattattcgctatcagcgtgatccaatgtttcaaaaagtaggtgaatggaaacagttcactatgaagcaggtcttgcgtaatgcacacaaagtgattcaacaacaggttgatactcatacgcgcttttatgaccgtaacaaaattggtgtcttccacggtcgtgcatatattcaagacaaaaatacagttttagtttttagccacgaaggcattaaagaaacaattatctgtaagcaaatcgtgatcgcgacaggtagtcgtccttatcatccgcaaggtcttgattttgaccacccacgcgtatttgattcggacaaaattcttgatcttgattactcaattcaaaaaatcattatttacggcgcaggtgttattggctgtgaatatgcctcaatctttattggtttagaccataaagttgacttgatcaatactcaacaaaaactcttaagttatctagatgatgaaatcgccgatgctttgtcttatcacttacgtgaacagggcgtgttgattcgtcacaatgaacaaatggatcatcttgaaacatttgatgaccacgttgttctacatttacaaagtggtaaaaagattaaagctgatgcgattctttggtgtaatggtcgttcaggtaacacagaaggtttaggtcttgaaaatgttggtttagtaccaaatagtcgtggtcaactttctgtaaatgatcaatatcaaactgaagttgaaaacatctatgctgctggtgacgtgattggttggccttcacttgcttcggctgcctatgaccaagggcgctgtgctggtgcaaacatgagtggtgaagatgctaagccagtacgtgatatccctacaggtatttataccattccggaaatctcatctattggtaagaatgaacaggaattaacggaagagaaaattccgtatgaagtcggtcaggcttctttccgtcatttagctcgtgcacaaattaccggtgatacagtaggtgagttgaagattcttttccatcgtgacactttggaaattttaggtattcactgttttggtaataatgctgctgaaattatccacattggacaagcagttatgcacagcccaaacaatactttgaaatattttgttgaaacgacatttaactatccaacaatggctgaagcataccgtgtagctgcacttaatggtatgaatcgtttattttgattttaaataagtttttcatgaaaaagcccacaaacttgcgggcttttttatttttattagaccatatgttttttatatttttatgacaatgtacagagtgatttcagcgtctcatctctttagtgtgcacaaaatgcttgattaaaatattcaaacaaatcaggcgtctgtttccataaaacaatagaaaaaaccagaagagctaagatgaggaaagtcataattgttttcaaaagtacggcattatgcgtcatgaataacagcctcctcatttacaaagaaatgtacgattacccctaatatgctcaatgcgatagaacagagccaaatcacattgtaattacctgttaaatcatggttaacaccaccaagccaaccaccaaagaaagacccgacttgatgggtgaaaaatacaataccacttaacattgaaaggtatttaacaccaaacatatttgccacgataccattggtgagaggaaccgtagaaagccatagaagccccatgataataccgaaagcatatactgtataagtgcttagaggtaacaataagaaagcaatgattgcgatgccgcggctaccataaagtgccattaataacttaggtttcgagaaacgatctcctaaccagcctgcgccataagtccctacgatattaaataatccgactaaagcaagaaacaccgtacctgtagcggcatcaaagccgtggtcgattaaataacctggtaggtgaacacccaaaaagacaacttggaagccacatactaaaaagcctaaagctaaccaccaaaaaggtttatgttttctagcaatattcagtacttgtttaaaggtgagctgaggttgggcaattgcttttggggtttggttgcttggcccttttaacatccatgctagaggaataataagagcgattaatagcgcacttaccattaaagctgacgaccaccccactgttttaagtaaaagaagggtggaaggcagcataataaattggccaaaagaaccggctgcactggcaatacccattgccatacttcttttttctggtggagcagctcggcctactgcgctaagcaaaactgtaaatgaggttgctgataaagctaaaccaataataagacctaagcttaaattcaaaatgagtacacttgagctaaaagccattaagagtaagccaagggtataaagtaatccgccgactgttaccacaactttactgccatatttatctgcaattgccccagtaaaaggctgaactgcaccccagattagattttgcatggcaattgcgagactaaagacatgctgtccccaaccgaactcatgactcatcgggactaaataaagcccaaaaccatgtcgtacacctagtgacaaagccaaaataatggcacttccaatgagcatataaatgagtgattgagaaaactgatggcttgttttagtcattgtgagtagaaaattataagaatgtgataaatcattgtagaagatatatcgaataatatcgatatatctataaaattattttaagaaaagttaaaaagtatcttagagattgtggactattatgagagaggggaagaagcaaaaatcatttttgatttctgcttcttatcagaattaggctgcggaattgcgttcaagtagagcctgttcaaaaagtactttttctttttctttgtgctcggttgtgaagcgaatcaaaattacactacagcctgcaaccataaccagtccacctaaaataaatagacaagtttgaatatcaagtacgccttttagtaagaaaccagctgctactgcgcccacatttccacctgcgccaataatacctgcgacgccgcctaatgcatttcggtcaataaaagggactagtgcatatgttgctccgcaagccatatgggtaaacaatgcaaaaactgtcatggaaataattgcaagagctacgacgttcatttgagagaagagtattaagaataaaccttcgcctaaaatcatcagtacaagcactttagtacgtccgtctaaaccttttttaagtgcgactttatcggaaataataccacctaatgcacgtgcaaataaggcaagaagaccaaatatacctgcggttaaccctgctgtttttaaatccattttgaattggtcaacatagtacattgccgcaacattatggatgaaaatttcaataccaaagcaagcaccataagcgaggaataaaatccagacacggtagttacgagccgcttgcattaagattgccatgccaccctttttaccgctacccacctcaataccttgtgcacgaacttctttaaagtttccttgaggacaatcttgggtaagtttccagtaaagaaccccaacaattaccatcattacgcctggtacgattaatgcaacgcgccaacccatagtttgctcgacaccgaacattacaattgcaccgagtaataaaggcattagagcttgtgttgcaccaccgccagcattaccccaacccgcagcagctgcatttgctgtgcctacgacatttggtgcaaacatgatactggtatgatattgcgtaatgacaaagcttgcgccaattgcaccgatgagtaaacggaagaaaagaaaagattcatagctgttggcagcggcaacaccaaatacaggaatactgccaagtaagagaagggtggtgtaagtaatacgcggaccatatttatcacaaagtggtccgacagcaagccgcactaaaattgtaattgcaacggcggcaatattaatattggcaatttgatctttggttaagccgaactcacctttaataacgggcattaatggagcgcaagcaaaccatgcgaagaagcagacaaagaacgcgagccaagtcatgtggaaagcacgcatagctggggttgaaaaactgaataatttaatttcagtcgctttttttgcatctaaattaatatttgaagacatacgccgtccccctgaactgaacgaaattttaatttgcacgacaaaatgaattgtctatttgcataccgatcagagcggacatctttggccgtcttggtttatccattgaatcgccattgattcatcatgtcataaataaagcaaagggcgtgccaaaagataatttttactaaaaggaaaatcttagtttttaattttattaggttagttgtctaacataaaaatcattagagaaaaggaattaaaagaagaggtgttaataaaaaataaagaaggttgaacttagtaaacatgatcctaaaaaatgctcatttttttggcattttggtttaaaaagaagcaattttggcaggataaataaaaagctataaaagcttaagtaaagcttttatagcttgtgtgcttttgagatttagaatcggtaaccaataccggcataacctaatattggattaatttcgatatctgcttttgcattaattaactcaccgtacttggcatcattgactgtaatagttgtatccgtttttaagtgagcataagacacagagccaacagcataccatttgtcattaaagtcataggtgaaacctaaagttgctacgggtgcaattgcgtcggatgcctcaagatctactttaggatcaccagagctagtttttctttctaaagcagcacccgatttaccatctttaatattgacaatcatatgcccagcatttactaagtcattttcaatttcaggatttatttctaattcattgaaatatgcatacatcacacctagtccaacataaggtctgaatttatttacgccagttttgccaaagtgatattgtaattcaaatgctggtgtccaagctcgagctgatgccgcactcccatgtgcttcaagatcggtaataaaaatattattttcaagttccatagaaccaagaattccaccagcaggttttgcagtagcggaaaaaggtgcataaatcttacctttaccttgtagatcgactttaggcggaatccctgcttttacttctaatgaaatattatctgtaaaaaagtaatttgtcataagaccgagagtagttacatcatctgcttctaagcccgtattctcagcctcccattgactcaaaccgcgaatttcagctgttccacttaaccatgcgggaatagtatcagtacctaaaccaataacatcaataagttcttcaagaacgacattactattactatcggaaatattgtcttgaatagtttttactttaatatctccgaccttagattgctcattttccttaacagaagtgttaatcctaaaaggctgggcttttcctgttggtttgacatataaaggaccagctgagactgaaaaacgtttgaaaccatcaccatcttttaaactaaaatatggggaagcggcggaagtgactgttggcagagcaaataaggcagctgtcatacaaaataatgactttttcatcataaaaggactccatgtccgagcatttgtttactgatttttattgagcccaccataacgcgttttattgaaataattgtgtattaaaaattaataattgtaatttttttgaaatatttgtttatatttggaaatatttattaataaaaagtacaaaataaaaaagaaaaggctacataaagtagccttttattaattttgattaaattattgattgaagcgtgaaagatcttcttctgggcgagctgttaatacttcaatccctgttttagtgactaaaatagtatgttcatattgagctgaaagtttatggtctttggttacaactgtccatttgtcaccaagcaatttggtttgccaaacaccggcatttaccataggttcaatagtgaaagtcataccagcttctaaacgcatacccgtaccagcttggccatagtgcaacacttgaggttcatcatggaaaacggtaccaatgccatgaccacaatattcacgtactacgctaaaacgttctgattcgacatatttttggatggcatgtccaatatcgcctaaatacgaaccatctctaactgttgccattccacgatacatcgcttcttgagctactttacataaacgatttgccagaatagaagtttcaccacccacgatatacatcatgttggtatcgccatgataaccatctttaatgacggtcacgtcgatgttaaggatatcgccgttttttaagattttattttcagaaggaataccatgacatacaacatggttaaccgaagtacagatagagtgttgaaaagcagggcgtcctggcgcaccaccgtaacctacacaggccggaatagcgtgctgtacattttcaatatgattacgacaaatcgtatcaagctcgagtgtgcttacaccagctttaatatgcggcttgatcatatctagaacttcagccgccagtcgtcctgcaatgcgcattttttcaatttcatctggagttttgattaatcgacgtggagctgtataagtactgttcatgatctctaaaaacttttggtaatttacaagcgtctatggtataaatagccgcccattttatcaaatgcttttcgtgaatatcttttacgaagaattttgataggtggagtaaaaatccgcacatatatcgtcacattactctgggtgcccgtaaaaaggtggagaatgcggatatatggaggcctaacccaacttttaaggtaaagaaaatggcagattacaacgtaagcatgcgcgaccttcttcaagcaggtgcgcactttggtcaccaaactcgtttctggaacccaaaaatgcgtcaatacatttttggcgcgcgtaacaaaattcacatcatcaaccttgagcacactgttcctgcgttaaatgatgctttgaacttcgctaaccaattagcaagcaaaaagaacaaagttttgttcgttggtacaaaacgtgctgcttctaacatcatccgtgaacaagctcaacgcgctggtcaaccatacgtagatcaccgttggttaggtggtatgttgacgaactggaaaacacttcgccaatctatcaaccgtttaaaagatcttcaaactcaatctcaagacggtacttttgctaagcttactaaacgtgaagctttagaacgtactcgtgagatggaaaaacttgagcgctctttaggcggcgttaaaaacatgggtggtttacctgacgcattatttgtaatcgacgttgatcacgaagcgattgcaatcaaagaagcgaaaaacttaggtattcctgttatcggtatcgttgatacaaactctaacccagacaacgtagattacgttattcctggtaacgacgatgcgatccgtgcagtaactttatatgcttcagctatggctgatgcaattcttgctggtaaagaatacgctcaatctcaagcgaacgctcaagcaaaaggcgatgacgctgcgaaagacgcttctgaggcttaatgcgttttgacgcaggcttgtcatttttgcgacatgtaatggtggcaaattaagcgtcgagagtgcaaacggcccagagtttctttgggccgtttttgttgaacagatttattttctaccgattttaggagatcaacatgactgcaattactgcaagcatggtaaaagaattacgtgaccgtactggtcttgcaatgatggaatgcaaaaaagcattaacagaagcgaacggtgacatcgaacttgctattgataaccttcgtaaatctggtcaagctaaagctgctaaaaaagctggcaacattgctgctgacggtgcaatcactatcgttcaagacggtaataaagcgatcttagttgaagtaaactgtcaaactgacttcgttgctaaagacgaaaacttctctaactttgcacacacagttgctgctgctgcattagctgctggcgaaactgatgctgctaaaattgctgaattaaaattagctgatggccaatcagttgaagaagctcgtatcgcgcttgttcaaaaaatcggtgaaaacatccaagttcgtcgtgcgaaaatcgttgaaggcgaacaattggctatctataaacacggtttaaaaatcggtgttgtagtttcttatactggtgatgctgacactggtaaaggtattgcaatgcacgttgctgcattcaacccagtagcagtaaatgctgaagctgttccagctgaccttatcgctaaagagaaagaaattgctgaagcgaaagcgttagaatctggtaaaccagcgaacatcgttgagaaaatggtaactggttctgttgagaaatacttaaacgaagttgctcttgaccgtcaaatgtacgttatcgacaacgagaaaaaagttgctgacgtattaaaagcgactggtacaaatgttgctaacttcgtacgtttcgaagttggtgaaggtatcgagaaaaaagctgaacttagctttgctgaagaagttgctgctgctcaagctgctgcgaagtaattcgtatcttcaaaaaaagccccctatggggctttttttatctctgttgaaaacggaatataaagatgacaaataaaaagaatctaggtattggcggcataattgttttattgattgctgcatatttgggtctggacttatctgggcataaaaacaattcgacaccatcatcaagcatacctgcgaatcagcgtactgaaacgacgttttcaaatgatggagtagataccataaaggctgcttatgaacgtagagaaagtaacgttcaagtgcagggtagtggtcgagtaaaagcaatcttaaaagaagataatgatgggtcgagacaccagaaatttattctgatattaaaaaatggactttcaattttagtagcacataatattgatttagcaccaaaaattgaagatttaagaaagggtgatattgtcgaatttaacggggaatatgaatataacgaaaaaggtggagtattacattggacgcatcatgatccacagaaccgccatgaaaatggttggttgaaacataatggtcgtatttaccaatagaaaataggatatccatttccgcataacagcaattttgttctatgcatctttttaaaacatgctatgtttttttgtagataaatagatgagatgtatatatgcaccgggaacaggctgactacttgcatttgcgagagttgggcggtttagaattattaaaagctcattatcaccaaacacaattttcaaagcatactcatgaaggatattgtattggtgtcattgaagagggtgctcagtctttttttaggacgggtcaactacatgttgctcctaaaggtgacattattttggttaatgcagatgaaattcacacaggctcatctgctgttgaatcgggctggcgttaccgtgcaatctatcctacacccgaaatgcttgctgaagtaagccaagatttttttgagcaaggccatggggcaccttggtttccgcaagctgtaattcaggacttgggattatctcaacaactctgtttattatttgatttattagaacaaaaagacaattttttgcttaaagaaaccatgtatttatcaacattagcctgcttaatggtacgtcatggtaagtcaagacacaccttttgcgagttgccagaagcttattcaaaagtattaaaagttaaagatttgttagctgatatgcctgaaaagaatttttctttgcaggaattggctgatatggtcgggttaagtgcatggcattttttaagacaatttaaaaaacatgtgggtttaccgcctcatgcatggttagtacaggcgcgtttgcaaaaagcgagacaattattaaaacaaggcgttcaaattgtaatggttgcacagcaatgtggtttttctgatcaaagccattttaatcgtcattttaaaaaggcgatgggtgttacaccaacccaatatgtggcgagtcttaatctttaaatttatttgcagtgctaaccgcaattttgttcaagcgaagctgagctaaataccagaaaatctataaataataactgttatagatgtctagggatgaatactcatttaaatcaatctattagattttctaaaagccgaccaccgcatctttttttacgaggagcgatagatatattgccactatctatttcggttataccatgggctattttagctggatcaatggcaattcatgcgggtttatcattttataaagcactagcgatgtcaggaattgtgtttgctggcgctgcgcaattagtaagtttaagcatggtgatggaaggtgcatcgttattaaccatctatgtcactattttctttcttactgctcaacattttatttatgctttaactttaaggaatgacgtttctattttacctctctcaaaaagactaactttagggtttctgcttaccgacgaattatttgcagtaagtgttcctaatgagaaaaaacatcctcaatacttattcggagcaggtctttgcttttatttattttgggtggtttttagtttagttggtattttattagcaacggcgctacctaacttattaaattatcatttggatttttccattattgctatttttgttgccatgattgttcctatgtgtaaggggaagcctgtaatggcaggcattttaatgacttgtgtcagtggttttgtacttaagtattttcatatagaaggagccattctaatttctggtttattggggatgtttattgcggtaatagtcgaaaataaaataggagaaaaataaaatgtcatggctcatgattttaggactggcagctatcgtattttttaatcgttattattttttagaaccaaatgtaaaagttaaattaccagtacttatgaataaaatgttgaattattcagctccttgtttattaagtgctatttgtattccagtaattttttttgaaaataatgaattaagaggatttttagataatccttacttatacgcaacgatattttgtactgtcgtggctttctattttaaaaaagtgttaccgagcgttctgctgagcctagcatttttttattttataaattttctaataaatcattaagttaaagctgaatctttttaggattcagcttcttcaaaatttattgagcaatcagtttcttttgacggcttttccaatgaggtaatatctttgcaagataagcatccatacaccagaccggaccaatcaagagaaattgcaaatctttaaagaaagaaggtttttttccttcaactttatgtccataaaattgtccaatccaggcaaacacaaaaagagcaatataaaatcctacacctactggcagaacataaataagccatgccatcacaacaagtagagcagccattgctactgcaagtacaagatcaagccgagcataaaaaatgagggtcagtactacgagtaaagcggtgagtaaggcactaaagtgagcaataattccaataatcgaaaataaaatagctggaacacatacccagtgaattttcttatttatcgggttttgatgactttcactatattcatcaaaccattcaccgatagatttcatagaccttgttctccttgtctaattttgagtcattctttttctgtttatattttatcctctcgttatcgggagagacaagacaagttgtatatcgacatgtttgttaaatcaagtaagcctaaaatttaaagtttattcatttcggcacaaaaatgaaaaacagcactgaagaaaggggaggatgagctcaaaaatttcaggttatttatttgtgattttgagagagtcgaatcctcaaaaaaacctcattttcatgaagaatgggaaaataatagaaaaatactcaactcatcttgtcttaaaacgcgttaaacaactctttttagactaaagtggtactagggtagcggaattattttaaaatggctgtaatcgaaaaatatgcgcaaaaatcgataaagaataaatgagtgtgtttttgggttaaaaaataatcatttttgtaatgaaaaaacgaatctagacacaaaatttttataggtttttttgctctttttatattaaaaaagccacaacttaactggtggctttttcatgaactcgaggagtaatcgcttatgaagtaggaccgtctacacgctcaatacttactttagcagtaccagcattggtaataccaaggcgtttagctgcaccgtatgataaatcaagcacacgattaccatggaaaggaccacgatcgtttacttttaccactacgcttttgccattgtctttgttggtgacacggatataacagttaagcggtaagctacggtgagcagcagtaagtgcattcatatcgaatgtttcaccacttgcagttttacggccatgaaattgacgaccataccacgatgccatgccagtttggctaaacttacgaacagtatttgaagctactgtgttaagtttttcaatcactgaaggctcatcttcagggatttcaattttagctgcgatagcttgacgacggatttgatcgccagaacgttcagtgattgaaagactgttaatgttagagaaacgagaattaaagttttgagtatctttactcaacacacgagcagctaaatttgcatttggaccatctacatcgctatttaatgatgatgattgcatcatttcagcgtgcagtggggccatgcttaaactagccgtcagtgcaagaatgtatttcagcgataactgcatttatataaactcctgagaacatgcactttttcatttagccaaagagctaaaaattgaagtgaacatgcctaattattcacttttgcaattgcttgattggggtggataatattcatcgcttacggagagtgtctagtctttaacgagaaatagttacaaaaagggcaaaaacttacagttttaggttaaaaaataaccgaatatgtaacaaggtatttaaaatgtttgtattgtgatcgatttaacaaaaatatttattgacttttacataaactcatcaaaaagctagcctatcggctagctacttctgtacctaacaaccatacggcagtcgcatacattcggcttttgttataagtcgtaattacttgaaagttcggataggttaaatagtaaattggaccgttatagtcttgtaattgaataacatttaccatatctaagtcatcaattttgactaacggatttaaaggggaaatcccttgattttttagtgcaccatacggagtgggctgggtcaaatctttagcaatgatactttccggatttgaacctgtgtaacgagccataaaaccaataggttgatcgcgttgccagccttgttttgctaagtaatttgcgattgaaccaatcgcatcttctgcagagtttcgtaggtcgatatgaccattaccatcaaagtcgaccccgtacttactaatgttgcttggcataaactgcgggaagccaatggcaccagcataagaacctacaatactattggttggataaccttctttgtaagtccatgcaatgagagcagctaactcatcgccaaaatattcagcacggcgtgggtagccaaaagctaacgttgcaagtgcatcacgagtaataaacgagcctttattggctccataacctgtttcaacacctaaaatgcctagaataaccgcttgagagacaccaaattgttgttcagcacgattgagagcatcggcatattggtttttaaagcggacaccacgttgaatagtaccttcgactaaaaacatagagcgatagtcgtaccaaggcttactttcaccagggcgagtcataatatttataatgtttggtaaattttttgcaccattcatagcggcgtcaacctgttcaccgcttaagccataagtgctcatggctttttgtttaaaatttaaatagttaggatgagttacaaaatcattggcctgagcaaaatgacttgtgctaataaggccagtacacaaggcaagcacttttaaagttttattaacaaattgagacaacatatcttttttaaattccagattatcgatgtgtatgaatagacatgactaaaccaaaagtggccattaaagtaataatagcggtaccgccataactcataaaaggtaagggaacacccactacaggtaaaataccactgaccattcctgcgtttacaaatacataaacaaaaaaagacaaaccaaacgcgccagccactaatcggccataattatgaaagctttgtaaaccgatttgaaatgttctaaaaataatggccgaataaagaattactaatataagtacaccaattaaaccgaattcttctgagtaagcagcaataataaagtcagtatggccttctggtaagaagtgtaaatgtgattgagtaccttcgaggaaacctttacctgagaacccaccagaaccgattgctgttttggactgaataatgttccagcctgttcctaaagcatccgcttctgggtcaagcaacgttaatactcgttgacgttgatagtcgtgtaaaaggaattcccatgcaattggaatcacaatagctgcacaagctgctgctgcaccgatcatgcgccaagatagcccacttaagaacagtacaaaaatcccacttgctaatactaatagtgatgttcctaggtcaggctgttctgcaataagtaaaaatggaacaccaattaacattaaagacaaaataacctgcgagaagctaggaggaagaggtttacgagctaaaaaccatgcaaccatcattggcatgccaattttcataaattcgctgggttgaacactcccgaaccctggaatatcgatccagcgttgagcacccatgcgaacttcaccaaaaaccataacgccaattaaggaaaacaggccaaataaataaaaataaggtgaaaaagcttgataaaccttgggtggaatttgcgctaggctaatcatgaccagaaagccgataccaaagctcatggcctgtttactgacgagtcccacatcttgtgcagatgcactataaagtaccgttaaacctaacaatgcatttaggaataaaaataggcataaccaagggtcaatatgaagctgctgccagcgtgaaggttgcatggcagtactaaggccatctcgaggagcttggcgtaaaaatttatattgtggactaggagacatgcggctttaactaaaggtcaatcagtgcttggcgcatgctaacataaacctgatttatgacaatgtatatcaatattttgcaataaaaaaacctggctctcaccaggtttccgatagactattttttattagttaaagaatagtccatcatgatattcagccatcgcttttagttcagtgcgatttaaacttggaatgagtttgtcgatcgcaatatgaactgctttagttacagcagcagcgccaatatcggctgctttacgcttaatcatgcctaaatctaatgttttattaaagtcagacataaaatgtctcaccatagcatcaccgaactgtttatatagttctgctaaggctgctttattaatgtcattacccgcttgaagctcggcaaaattatgcttcaagttggtaactaggccagcatctaaagctacgccaactttatattggccttgcggatctttaaataagcttttctctgaaaactcaactgactgtttaaccacatcgtttggcgctttgctgagtaattgctttaaaagcacggcaactgttgatttgacataaccagctagtttttcggcagtatctcttttttcactcgctgggaaatgttgtactaactgagtaagtacattttcaataatttcttcattgagttgtaaagcgattttgtctcgaagtggatataacggttcactagaatttttattcgcaattccagtctgtatatcgttcaataagccttcagaaggggtaaaaccaaaaaacggcatggtgtatcctcaaattattcgttttattgtcgtgccaatcgaatcggttttggcatccatgtaagatccgatactcggcaaggattgatatcaagtccaccgcggcgagtataagttgcataaaccatcagcttttcaggttgcaaattttgccaaatatcggcaaagatttgttcgacacattgttcgtggaaaccgttatgctgacggtacgaaataatataggctaaaagactacgataacaaggttttttgcccttaaaacgaataaaaactgtcccccaatccggctgacccgtgactgggcagttacttctcaaaagatgagaatacagttcaacttcgatttcttcacctgactcatcaagttttaagagagtagcatcaggatgttgttctaaacgctctggcataagatcatcaatacagatcccttgaggtttagaaatctctaaatcatctacttgaaatagggttaattcaacttttgcacctgccgcagcagatagatctttttcaactgtttcaatgaatgactgtgtagagtcaaactgagtgaagttaagactattgaaataaagttttaatgactttgattcaattaaattcggtgaagaagctggcagtgtaattctgccaatagcaacctgtggaataccgtgagcattcaaccaagaaatttcgaaaacgtgccaccaatctttaccttgggttataccttcgatatgagcatatttttcacgagattgagcacgtgcaattggaaataacacatcgggttgatagctagttggatattgggtttctttacccaataaagactgttcgacactcattcacgcattcctgaaccacgagcaagtaaataataagcaattccgtaaagtacagcacagcataatgtcacgatgattaaagagaacgaaacgttcacgtcactatgacctaaaatgccgaaacggaaagcatttaccatataaacaataggattaattaaagaaagtttttgccaaaaaggaccaagtgcactaatggcataaaacacaccacctaaataggtaagtggagtaagtacaaatgttggaataatagaaatatcatcaaatgattttgcgtagactgcattaataaaaccgcctaaagaaaataaaacggatgtaattaatactgtatatatagttacgaaccagttatggataaaaagatcagtaaaaaacatactcatcgcggtaacgattgcaccaaccaagacacctcgacaaataccaccaataacatagccccacaaaataatatgcagaggcacagggctcataatcagctcttcaatgcttttttgaaatttcacactaaagaaactcgatgatacattggcataactgttggtaatgacagccatcatgatgaggccaggtacaataaattgcatgtaacttacgccacccatttcaccaatacgtgagccaaccaaattaccgaaaatgacaaagtataaactcatggtaattgcaggtggtaataaggtttgtggccaaatgcgtagaaatcggcgtacttctttacgaactagagtccagagggcaatttgcagttggttgaagttcattttgccgctccttcaagatttttctcgaccattttgacaaatagctcttcaagacgattcgatttatttcgcatgctgcgaacacgaataccttgtgactctaaaagttggaataaatcatttaatgtatgtgctttatccattgttacttctaaagtactactatcaattaaattgaacttcacaccaataatattgagctggagtggggcaataggttcagccaaatcaaaaataaaagactcttcactcagctggtttaagaaacttttcatgctggtatcttctttaatgacaccacggtcaatgatggcaatttgacgacacaacatttctgcttcttcgagataatgtgtcgttaaaataatagaagtaccgttttcgttcatttcagtcagaaaatcccacatagaacggcgtaactcaatatctacacctgcagtaggctcatctaaaataagaagtttaggctcatgcatcatggcacgggcaatcataagacggcgtttcataccacccgacagcatgcgtgcttgtatattacgtttttcccataggcccagtttttctaaataatgttctgcgcgcttttctgcaatctttctatggataccgtaataaccagcttgcgttactaaaatatcaaatgctttttcaaactgcccaaagttaaattcctgagggacaacgccaagctgctgttttgccaaggatggatgagtgtcgagattatgtccaaaaatctcaactgttcctgaggtctttttcgtgagggagctgataataccaatggttgttgatttgccggcgccatttggacctaacaacgcataaaattcaccttcaggcacagtgaggttaataccttttaacgcctgaaaaccattacgatatgttttggacaaatctcttaaaaccaaagcatcagtcatgaaattctcacattatgaaagaggggtatattttgagcgataatgattaataaaccaagtaaaatagtcggaattttataaaattgagataaatttatgaagttattatatataaaatggtgcgctcggcggggatcgaacccacgaccccaggcttcggaaacctgtactctatccaactgagctacgagcgcatgtgtggggcacatcataggaaaaaaacacttgcaggtaaagcacgaaatacgtaccaagtgaatttaatgcttaattaaacagcagcttgttatgttttagttcttttgctgaatgagctgaattgaataattaatagagtgaagcgtatgcgccagctcatgagggggaatccttgactcttgcaaactggtaatccattgcatttggcacatttttagttcttgaagatttttaatttgttctattttttgaataagtggtttggccataagcccacagtattggcttaagctttgtttcattaatagttgtatttcttcaaaagtaagttgttgaacaggaattggtggctgagtattttcaatatttgaagaatggcatgatggttctagagaaactttaatttctccagtcaaatcggcactttcattttcatctatggtgcttttttgttgcgcttttacttctaaactcgtggtaggtggtactgagagagctatctgttcagtaaattctgaatcgttttcactaataggggcaataagctttaagtcaataagttgttgaatgagttctggtggagcaatgcgttttttaaactcggtattgagactttgaaaatcttcatgatcaattaatagaagtaaacgtctttgtttggcatttaaagcaatattacgttgttgaagcgcgactcttcccaaattggttcgataaaaaccagccatcatttttccccaatataaaaatgaagcagcctgtttgattttttctatcaaacagtactgttcttaataaaatataaatggggctaacgataaaactcaaaaatgacaatatgatgaagaatttatgaatatcatctatttaggccgttaaaatgcactttctaatgctttacgtaggtaaacgtccagctcgtcttggcgcaatagccattgaatatagtctttagggagttcagcaatagctgtacctttatgcttgccaaagttaattgttgtgggaatacgtgcttcttcagaaacacggtacaactcttcaatgtcatgaatatttaaatgatagacaatatgcatcaagatattggcagttaaaataatatccgcatcggcacggtgcgcgcctttgagtaattcacgagctttactgctgccttgagaaatcatatagatcagtgctgagatattatgcgcttctgcatcaggccaggttttacgtgctaaagctagcgtacaaattggtttgatatgagaaacatctacaccgcaacgcgcaatcgcggcaatatcataatcaatattgtggccaataatataagttgtagtatctggcaatttaaaagttttatagtggggctgattttctaaatctgattctaatatatggtgtactgccatagctgcgtaagagatgggggtcccaacttgataaagttgatcaaacaatttgcttttatctaaggtgagcttgcctgcattaatttcaattggggcatatgcaatttcaataggcaaaccatttagtgtatgtgtttctgtatctaaaataatggcttgcatatccggccctttaaacaattacgagtaaccaagaatgttaacagttggcctcgcactttaaaacctgaagtgaggcggaaagtggtgagaacgacaatttatattaaaaatagaatttttcagggattgattttgtcgaatagaacttgcggaaaattaagattaggcgtaattgtttttaagacattagcgaatgttgattaaaaaactaaagcacaacaaaaatggaatttaagggaagatataccaatgaaaatgaaactattaatgacgagcgttcttagtacgagtttatttttagtcgcttgtggaggtggaagtagtgatgatggcccagctactactaatccatccggaactccaaccaataatattcaaaatccagttgttaaagttgaagcctatacaagtactaacttaggatcagttgccgcagaaagtagtattttaacttataaaatgttaggtcaaagtggacaagaagtgcaggcaacaagtctagtgtttacaccaaacactcaaccaccagtcggcggttggcccattgtagtctgggcgcatggcactacgggtgtggcagatgtatgtgcaccaagtaaagcagctttagcagacagtacaaaagatttaattagtaaattattagcagcaggttatgttgttgtggcacctgattatgaaggtttgggtaccccaggtatacatcctttcttaaatgttaaaagtgaggctttttcaattaccgatgcagtggttgcaacacgcaattatttatcgcaacgtaatttattaacttcgaaaaaatgggtcactgtgggtcattctcaaggtgggcatgctgcattaggtgctgcacaatatgcgagccgtgcacaactagactataaaggtacagtagcggtagcacctgcttctaatttaggaagtattcttttaaatggagaattaaaagctgcaagtgcatcagtatatgaaaaaaaggcaatctatgcgcagcttgatgcatttacagcgcttgttgtagcaggaattcgtaatacccatccagactttaattatcttcaagtatttactgaatctactgcaaggattgcacaaggcgctgaaggtttttgttatgaacctttactcggggattttagcgctactatgcaagtttatattgcaactcatggggaaacattagatggttatacgcgtacacaacctaattttatggctgtgccactagttaaaacatttttagataaagattcgcagccgttacaagtaaaagttacgacaccaatcattatctatcagggtttagcagattcgacagtacctaaattggcaactgatctattgatatctaatgccactactgtaggcactaaaattaatagttatgtgacgggtaactgggatcatggtacggcgatgagtagtaatgtagataatatcgttgccgatgtgaaaactttaatgcctccgcaataatgaataaatatagcgaagcccaagtttggctcctaaatgagtaaacttgggtttctttgctaatttctaataacttgagtttcccaaccatcatattctgcattaacttgttgagcgaatttccaaagttgtagcgtgcaagtatctattgcatggtggtttacatgatcaattctagaaatttgcaattgataaggcgaatccgttctgtcttttatttcattttgttgaacaatttcaaatcctaaaggcttaatcaattcgaggaagattgcttgatcagatttatttttaaaataaatccaatgatctacaggacgggcaatttcaagagaatctccatgtttttctaaattttcgataacagcattatttgaaataatctgcatgatttctggacttggatacatataatcaaaataagttgaccaattagggtctgatttttgaccgaaacgataattatagtttggataagattgcatgacttggtgaatgatgtggttaacatctagtccatcctcacaataaaagtaaaaatctctcaagtgattatgtgttagacgtccggcataaaggataggatgtgttgcaagtgatagagtgatttgatcttcgatttcgatgagttgatcaaattcttcattagacgataacccatcttctctagaatgattcatttgtatttcaagccaaagcaaaatcggtttagatgttagtggagcaatttgggttaaagctagatttagaaagtaacttgctggttgttcatctatttgacagatgtatatattccaatcttcgggaatttctaaagcttgatcagttgcttgctggtctgttctaatatgcttttttttgaaccaaaatttatcaagtaatcccatatagatatcctttttatttgttttatagcataactaataagctgaagaaaattcatagataattaactaaatatcaatctgtgcaaggacaaacttcgtgttacaatacgcaccaatcttagcacggcttaaaagccctaatttataggacccccgctaatgtttgccaatatttccatttctgaatttgatccagaattagctcaagcaattgcttctgaagatgagcgtcaagaagcacatatcgagttaattgcatctgaaaactattgctctcctgcggtaatggaagcgcaaggatcaaaacttacgaacaaatacgcagaaggttatcctggcaaacgctattatggcggttgcgaatttgtagatgttattgagcaaatggcgattgaccgtgctaaagaactttttggtgcagattacgcaaacgttcaaccacacgctggctcacaagctaactctgctgtttatctagcgcttcttaacccgggcgatacagttttaggtatgagcttggctcacggtggtcacttgactcacggtgcaaaagttagcttctctggtaaaacgtataacgctgttcagtatggtctaaatgctgaaactggtgagattgattacgaagaagttgaacgtttagcattggaacacaagccacgtatgatcgttgctggtttctctgcttatagccgtgttgtggattggcaacgtttccgtgacatcgcggacaaagttggtgcttacctttttgttgatatggctcacgttgctggtcttgttgctgctggtgtatatccaaacccagttcaaattgctgacgtaacaacaacgacgactcacaaaacgcttcgtggtccacgttctggtttaatccttgcgaaagcgaatgaagaaatcgagaaaaaacttcaatcagctgtattccctggtaaccaaggcggtccattaatgcatgcgattgctgctaaagcaatctgcttcaaagaagcaatgtctgacgactttaaagcttaccaacaacaagttgtgaaaaatgctcaagcgatggctgaagtattcatcgctcgtggttatgatgttgtttctggcggtacagacaaccacttattcttgttatctttaatcaaacaagacgtaactggtaaagatgcagacgcttggttaggtgctgctcacattactgtgaacaaaaactcagttccaaatgatccacgttctccatttgtgacttctggtatccgtatcggtactccagcagtaacaactcgtggttttggtgaagctgaagttcgtgaacttgctggttggatcgctgacgtgattgacagcaaaggtgacgaaaaagttattgctgatgtaaaagcaaaagttgaagctgtttgtgcaaaattccctgtatatgcaaaataatttgtgtatataaaaaagcgccgtaaggcgctttttttattaactactccaaccgccccctaaagcacggattaaattgatgcttgcaatgatttggctgcctttcagctgagctgctaattgttcttgttgcaaaatagtgcggtcagaatcaatgacatcaagatagctaatagcaccttctcgataacgtaaatgagaaagttgattggcatgacgagaagaggagagtgcttggttttgagcctgaatttgctgatcgagaattctttgatcagataaaccattttcaacttcgcgaaatgcattcagtacagtttgtctatagttggcgacgctttcctcataagccgctcttgcttgagcaacgcctgctttacgttgtccaccatcaaataaaggtaacgacaaaatagtaccagcgacaggtcctagtaaaaaagtccgactcgaccatttacccaactcgcttaaacttgaagattcataacctaaagctcctgtaagactgagttttgggaaaaatgctgcacgagcaattccaatacgcgcattatctgctgccattgcacgctctgcagccgcaatatcgggtcgtctttcaagtaaagttgacggcaaaccggcagggagacggatactatttgcagttaaaggttgaactgccaagttaaagtctgctggtggttttcctaataagactgcaagcgcatgttctgcactggctctgttacgagcaatatttagggcagtggtttgtgcggtagcaagttcggtttgtgcgcgagaaacatctaattcactgcccagtccgtttttaaaacgaagctgcattaaatctcgtgtttcacctagcaatttgattgttcggttataaattgcttgttcggtatcaagttgacgtatcagaaaataaccttgagctacatccgcttgtagagctaaaagtgctgactgatatagagcctcttgttgctgtagatccgctgttgctgcgttgacactacttgctacacgaccaaataaatcgagctcatatgaaacattggcttgagcgcgccataaggtttgagccgaagtatgtgcattgtcatctaaaccgagtgaagccggagacggcttttggcgagttggcccaaatccggcatcaatacttggtaagcgttcagcttgagctgccgaacgtaatgcacgtgaagcctgaatatttgctgccaccgcttttaggttctgattgcctgcgatagcttgctgttcaagttcattcagttgagcatcattgtaaatgcgccaccattcaccacgagtttgttgatcggcaggttgggcaatcttccagttattatcttcaagtttggggtcagattctttgaatttgactggcactataacttttgcaggttgatattctggggccaatgagcagcctgcaaggagcaggcttcccatgagtgaggacaacaaccaattttgttttgatgtaatcaccaaatgtcctccttaatgatcgtgtgggctagctaacggcgcttcatgaactgccgcagaatgcagtttatgtttgctgttgagggtacgaatcagaacgtaaaaggccggggtgaggaataaaccaaagaatgttacaccgatcatgccgaagaatacggcaacacccatcgcatgtcgcatttcagaacctgcgccagttgaagtaaccagtggcactacacccataataaatgcaatagaggtcattaaaattgggcgtaaacgtagacgacttgcttcaacagctgctttaaaggcagtcgcaccttgcatttcaagttcccgcgcaaattcaacaattaagatggcatttttacaggctagcccgaccagtaccattagaccgatttgagtaaagatgttgttatctccagctgtcaaccagacacctgtcagagccgctaagattcccattggtacaattaagataactgctaatggtagggttaagctttcatactgagcagctaatactaagaacacgagtaatacgctaatagggaatacccaaagtccagcattaccagccaagattttttggtaagttaaatctgtccattcaaacttgataccacgcggtagagtttgtgcagcaatacgttcaaccgcagcttctgcttggctagatgaataacctggggcagggccgccgttaatatctgctgatgtgtaaccgttataacgaacgaccatttcaggaccataggtttgagttacattcaccaatgaagataatggcaccatttgtccggcactattacgggttttaagctgcaaaatatcttcagggttagcacggaaaggcgcatcggcttgtgcacgaacctgataaacacgtccaaagcggttaaagtcgttaacgtactgagaacctaaataaatctgcatagtgttgaaaacatctgtaacagcaacgccttgctgtttagcttttacacggtccagatctacgttgagttgaggtacgttaatttgataacttgagaacattggacccagttcaggggctgattgtgctgctttcataaagttttgagcagcatcgttcaaggctgaatagcctaaggcacctcggtcttcaagttgcagtttaaagccgcccatcgtgcctaagcccatcactggtggtggtgggaaaacagcgatataagcatcttgaatagctgaatatttctggttgagtgcacctgcaatagcatttgcagataagtctttagccttacgttcatcgaatggctttaaggtcacaaagacaataccggcactcgagctattggtgaaaccgttaattgataggccgggaaaggcaaccgcactttctacaccaggttgtttaagcgcagtgtcactcattttacgaatgaccgcttcggtacgatctaatgacgcgccgtttggtagctgcgcaaagctaattaaatattgtttgtcctgcgcaggaacgaaaccacctggaacaatataggaaataccaacggttaaacctagaagtgctgcatagacacccattgccgaagctttatgggaaatgacacggctgacaccttgactataacgatctgaagcacgtgaaaacacacggttaaacagtgcaaagaaacgaccgaataaacgattcataatacgtgttaaggcatccggtttagcatcatgtcctttcagtaacagcgctgccaaagcaggagatagggtaagcgagttaaatgccgaaataaccgttgaaatggcaatagtcatggcaaattgtttatagaattgccctgttaagcctgtcataaaggcaagaggtacgaatactgcaacaagtgttaaagcaatggcaataatcggtccactgacttctcgcatggcacggtaagtcgcctcccttgggtttaagcctgcttcaatattcctctcgacattttcgacgaccacaatcgcgtcatcgacgacaataccgatggcaagtaccatcccgaacagtgatagcgcattgattgagtaaccaaaagcgagcatgagtgcgaatgtaccaataattgaaactggtacggcaagcaatggaatgattgaggcacgccatgtttgtaaaaataaaataacaaccacaacaaccagtgcaattgcttcaagtaaggtatgaacgaccgctttaatactggcccgtacgaattgagtcgggtcataaacaatgtcgtatttaattgaagatggaaaatcttttgaaagctccttcattgtgctacgcacttgatcggaaacttgtaaagcattcgcacctggtgcttggaaaattggaatcgcgaccgcttgtttattatcaagtaatgaacgtaagccgtattgagaggctgcgagttcaacacgtgcaacatcacccaatcgggtaaccgcgccatcaggggcagtttttaaaatgatatcggcaaattcttgctcagtggttaaacgaccttgagcattcactgaaagttgcaaaggtgaattacttggtgatgcaccgattgtacctgctgcaacctgaatgttttgttcacggattgcattcacaatttcggtcgcggtgaggttacgctgcgctactttttgcgggtcgagccatacgcgcatcgcgtagtcaccagatccaaataaaccgacttcacctacaccttgtaaacgtgccaaacggtcttttacgttgagcaccgcatagttacgtaagtaggtcatgtcatagcgattatctggtgaggtcagatgcactaccatagttaaagtaggtgagctttttagtgtggttacacctaagcgctgtacatcttcaggtaaacggggcatggcctgagacacacggttttgaaccaattgttgggctttgtctgggtcgataccgagtttaaagttcaccgtaatggttaaattaccgtcgctgtttgcttgagattgcatatacagcatgtcttcgacgccgttgattgactcttcgagcggagaagcaaccgtttcagcaatcacttttgggtttgcacccggatattgggcacgtaccaccacagatggtggaacaacctcgggatattcagaaatcggtaactgaaataccgaaaggagaccggcgagtaaaatcaagactgatagcacaccagcaaagatcggccgatcaataaaaaatttagaaatattcatatgtgattaaccttttgccggagttgatgttttatctgttggctgaggttgaggaggagtagcgctagcagtgatttgtgaatttggcataggaacgagatgcggtgtaacagggtcacccggacgaatccgttgtaaaccattcactacaatacgatcacccgcttgtaatccactatttacgatttgcaagccatcttgttgggcaccgagttttacttcgcggtaagcagtttgatttttcgcatccactactacgacaaaacgtttatcttggtcgacaccaaccgcggttggactaatcagaatcgctgggcgaggttggcctccacctaaacgaattcgtgcatataggcctggtaataaaacaccgtttggattatcaaaagttgcgcgaacacggatcgtacctgaggttgtattcaggttgttatcgattgagttgatcgtaccttcgcgagtaaagcctgtttcattggcaagtcccatatagacaggtacttgtgctgaattacgctgattactgatatatttcaggtaagtttgttcatcaacatcgaaagatgcgtataggcgtgatacagacactaaacttgttaaaacctgtgcgccattacctgcagagacgacattacccacggtcacttcagctcgtgaaattcggccactgactggtgcagtaatacgggtgtattccagatttaaacgtgcagattggacagcagctctagcggcttgtaggttagcattggctgaacgtgcatcattttcggctaaatccagttcttggcgagaaacagcattactctgaatgagacgttgaatacgcgaaagattgctggcggtatatgttacctgtgcttcagctgaagcaagctgggcttttgcacggttcagttctgcttcaaaaggacgagggtcgattgtgaaaagtaaatcaccttttttaacgaggcttccatctttgaaatgtacggcaatgagttttcctgaaacttgaggccgaatatcaacttgatcaattgcttctaaacgaccggaatattcttgccaatcggtaatggttttgcttactactggggctacatcaacagtagcagcttgttgggcagcggttggtgcagcttttgcatcggcattttcatgtaacaacataaaactgccaccggttgctaaaatagcgacaaagatggcagacagtgcaaactgtttgcgggaaaatgacatgaggtgctcctagttatttggatacctgttttcagacttttagttatggtccgtatgggagaaacagggtttatggaatggacggagcataaaagtttgtcaatcacgaataaatatattaaatttgataacactattcgtatttttataacaattgatgtgtttgcactagaaaatgcattaataggagtgtgtgtgtggatctatttcatgccatgagagtattcaacaaagttgttgaaacaaatagtttcagtttagcagctgatagtttgggtctaccgcgtgcttctgtgaccacaaccattcaggctttagagaagcatttgcaagttcgattgcttaatcggacaacacgaaaaattagtctcacaccggatggcgccgtatattatgatcggacagcccgtattttagcggatgttgccgatattgaatcttcttttcatgatgcagagcgggggccaagaggtcagcttcgtattgatgtgcctgtatcgattggacgtttaattttaattccaaggctccgcgattttcatgcacgctatcctgatattgatttagtaattggtctgaacgaccgacctgtagatttggttggagaagctgttgattgtgcaattcgggtgggtgaattaaaagattcaagcttaattgcgcgtcgtatcggaactttccagtgtgcaaccgctgcttcaccgatttatttagaaaaatatggcgaacctacctcaattgaagatttgcaaaaaaatcataaagcgattcatttcttttcaagccgtaccggacgcaacttcgattgggactttgtggttgatgatttaattaaaagtgtgtcagtacgtggacgtgtttcggtaaatgacggtgatgcttatatcgacttggctttgcaaggttttggtataattcaaggcccacgttatatgctcaccaaccatttagaatcaggtttgttaaaagaggtattgcctcagtggacgccagcaccgatgccgatttcagcagtttatcttcaaaatcgtcatttatcgcttaaagtaaaagtgtttgttgattgggtcgctgaactttttgcaggctgtccattacttggcggtacagctttacctttcgaccagaaatgtgaatttgcctgtgataaagaaactggtcatgaatatacaattcgtactttggtcgagcagcataatattgctgaagcttatacgctcaaaacttaatcttaaaatttgattgatttttcaacatttaatccgtcaatacagatcattgcttagacatcttcataaatccttaacttatggtatagaaattgctgttatttcagcagatgagtaagttcgaaatactcaagtttttatcaccttatttgtgttttaaggagaagcttcaagatggcaagctttatgaaaaaaatattcgtttcaacaaccttagttctggctgctgttgcgacgaatgtccaagcaaaggattggaaggtgattcgttttggtactgagtcgtcttatgcgccgtttgaatataaaacaccggatggcaagttaactggttttgatgttgatttaggtaatgctatttgtgcaaaactcaaagctaaatgtgtttgggttgaaaactcttttgacgggatgattcccgcgcttaaagcgaaaaaatttgatggcattctttcatcaatgactgttactgatgaacgtgcaaaacaaattttatttagtagcaaaatctacaacacaccaacgcgtatggttgcaaaaaaaggttcaccgttattaccaacacctacttcattaaaaggtaagcgtgtcggtgtacagcagggcacaattcaagaaacttacgctaaaacctattgggctccaaaaggtgtaagtgttgtcccttatccaactcaagatttgatttaccaagacatgatgtctggtcgtttggatgcaactttacaagatgcaatcatggttgatggtgctttcttaaaacaaccgaaaggcaaaaacttctcttttgccggcggcaatgtggttgatgtcaaaacattgggtgtaggtgcggctataggtttgcgtaaagaagatgcagacttgaaagcgaatatcgacaaggcactcgctgcaatcattgcggatggcacatacaagaaactcgagaaaaaatacttctcttttagcatttactaatgatgtgaaaaatgtcggctgagtgccgacattttaaaatctattctcatctcatcaatattagatattgtttttaaggagaagatgagtcatgtctttttctggctatgggccactccttctcagcggaacatggatgaccatacagcttgcgctgttatcactcttgctttctgtcattattggcttaattggtgcgagttcaaaactctctaatattaaagctttacgttatattgcaaccgcctataccacgcttatccgtagtgtgcctgacttggtgattatgctgttgttattttatagcttgcagttgggtctaaaccaaattactgaagcactgcaaatggatcaaattgatatcaacccatttgtggctggtgtgattactttagcgttcatttatggtgcatattttaccgagacctttcgtggtgcatttcagtcggttccaaggggacaaattgaagcagcaatggcctatgggatgacgccgtggcaggtttttcaccgtgtattattccctcaaatgatgcgttttgcattgcccggcattggtaacaactggcaagttttgattaaggcgaccgcactggtttccattattggcctgactgatatcgtaaaaattacgcaagatgcaggtagaagtaccatgcaactgttcttttttagcatcgtcgctgctgccatttatttggcaattaccacagtgtcgaacctgatcttaatatggcttgaacgtcattattctgctggtgtgaggaagggacaattatgattgaaatccttcgacaatattggcagtcatacctttggaccgatggcctacaaatgaccggtgtggcgatgactgcttggttattggtgctttctattgggattggatttgtgcttgctgtgcctttgtcacttgcgcgagtatcagaaaatatctggttgcgtggtccagtttggttgtttacttatgtttttcgtggcacaccactgtacatccaactactgattatttactcgggtatttatagctttgattatatccacgagcatcagacactcgatgcattctttcgagagggcataaattgcaccattttggcattcgcgctcaatactggtgcatataccactgaaatcttcactggagcaattcgttctattccacatggtgagattgaagctgcccaagcttttggtatgtcaaaatggaaactctacacacgtattatcattccgtcgatgttacgccgtgctttaccgttttacggaaatgaagtcattttaatgttgcatgccacaaccattgcatttacagcaacagttcccgacattttaaaaattgcgcgtgatgtgaatgcggcaacctatgacactttcagtgcttttggaattgctgcggtgttgtatgcggtgttggcttttattttgatttggatatttcgtaagttggaaaaacgttggttggcatttttaaagccatcgaatcattaggagacataaatggaacaggttgcaaaactagtgattcgcgatttacataagacattcggcgatcatgaggtacttaaaggaatatcacttgatgcaaatgccggtgatgtaattagtattattggttcatctggttcaggtaaaagtaccttgctgcgttgtatcaactttttagaacaaccgagcaatggtacgattaagctcaatggtgaaaaattacgcacggtctttgataaaaaaggcaatttaaaagtggttgaaccaaagcaactacaaaaaatgcgtacccagctgatgatggtatttcagcactttaatttatggtctcacatgacagtactggaaaatgtcattgaagggccaatccatgtacttggagtaaagtgttctgaagcggaagaacgtgcgcgcaaatatttacgtaaagtgggattacctgaaagcgttgaaagtaaatatccggcatttttatctggtggtcagcaacaacgtgtagcgattgctcgtgctttggctatggaaccggaagtgatgttgtttgatgaaccaaccagtgcgcttgacccagagttggtaggtgaagtactaaaagtaatgcagggcttggctgaagaaggacgtaccatgattgtggtgacacatgaaatgggtttcgcgcgtcatgtatctaatcaggtgatttttttgcatcaagggaaaattgaggaacagggccatcctgatgaagtactcaataacccgaaaagtgaacgtttaaagcaatttttgacgggcagtttaaaataagctgctgataccgagtatgatgaaattttttaaaaggcttctcagcatactcggttgctttttattatattttatagatgggtgtttttagaaaacacattaataatcacaatacctgcgatcattaaagccaaaccaatacaggcagccaagtctaaatgctgtttgtaaaatatccagccaattgcagaaattaaaataatacctgcgcctgaccaaatggcataggcaatcccgatcggaattgttttgagcgtaagagataataaataaaaagcaactgcataacccacaaccgtaataatagacggaattggaacagtaaaaccttgagatgcttttaatgctgaagttgcaataacttcacaagcaatcgcaattgctaaataaagataagacatgggaagctgcgccagaaagggttttaatcaatctacatgagatgttgatatagtttgaccagttttaacgattgttcaatttttttggtacaaaagtaccagtaaatggaactaaactgataaattgattttatcactagcaatatgctctagaccatttcttcatttatttaatagctggtcagcatagtcataaaaagaggatcagcgattttaacttgaacctctaaatggttttaaaaagagaatgagccgattaaattcaggtctttaaatttctctaataattgttctttgttttcaatatgcacagggtcttgttttatgcaatcgatggggcaaacaaccttacatgttggcgcatcgtaaaaacctacacattctgtacaacgaagtggatcgatttcataaactttgttgccttcaaaaatagccgtattggggcattctggtaagcacatatcacaattgatgcagtcatttgtaattaaaagtgccatatttaactcgctgaataagccaatgtagatgcagtaatactttcttttgcatgcggcaaattgcgtatgagtagggcataactgatatcaacatcttgtgagagcggaatttcaacaaaatgccccgaacctttagcatctgtaattgggttgccttttaaatcgcgcatttcggttaagttaaaggtgatattgccttgaggcgtcatcagctcaagtgagtcgcccaccacaaaacggtttttaacttcaatccgaatataattgccgtgacgttctacaacctctccacaaaattgttggtagtcgaaatgtgatgatccgtcagcatagttttgatattcgctatgcacatgccgtcttaaaaagccttcggtataaccgcgatttgccaacccttcgagttgagtcattaatcttgggtcaaaaggtttacctgctaaagcatcatcaatggcttttcgataaatttgagcagtacgggcacagtaaaaataggatttagtacggccttctattttgagtgaggcgatgcccatttttgttaaacgatctacatgttgtaccgcacgtaaatctttggagttcataaaataggtgccgtgttcatcttcttcggcagcaaacatttcttcatcattacgttgtacgagtaaagtttgaaccgaggttgtttctgattgtcctgatgagcagcaagacttttctggtgtatttagctgagtgactggaattacatcgccgtttaaatcttcttgggcttcatgcagtttatagtcccaacggcaagcattggtacaagcaccttggttggcatcacgcttgttcatatatccagaaagtaaacagcggcctgagtaggccatgcatagtgcaccatgtacaaaaacttcgagttcaatatctggcacatgttgctggatttcttctatttcttctaaagataattcacgagataaaatcacacggcttaggccgtagtctttccaaaatttaacagtggcccagttaatagcgttggcttgaaccgatagatgaatttgtatttctggaaaatgctcacgtaccatcataattaagccgggatcagacataatgagtgcatctggctgcatagccacaatcggttcaagatcacgaataaagttttttaatttgctgttatgtggctggatattcaccacaacataaaactttttacccaaagcgtgggcttcatcaattccgatttttaaattttcatggtcaaaagcattatttcgtacacgtaagctataacgtggttgtcctgcatatacggcatctgcaccataggcaaatgcatagcgcatgtttttaagtgaacctgcgggagagagaagttcggttttcataaaataaaaggcataaaaaatatatggttttattttattaactctatattttcgattcaacctactgaattagtaaggatttgatctatagctttttgtacaggtagcatattttttgctaactctcctaaacgcatcaaagcatttaacattttaggatttaactcaaaacaagctgcaatacgtaaacaatgactaaaacgtttatcagccgagcacaaaattcccggcatacataagattttttcatccatggcctgatgaaacagttctagggtatcaattgattcgggtagctctaaccataaaataaatcccgcttgtggacgactgactcgagtaccgactggaaaataacgacaaatataagatttgatggtgtcaatttgttgttgatagcgttttttgagctgacgtaaatgtagatcatatccgccattttctaaaaaaagtcccaacgtttctgtgagtaaagctggctcggcaacagtggttgtaaatttaagctgctgcacaatattgcggaagcgtccagcttctagccaaccaattcgatagtcgggtgccacagttttggtgtagctgccacagaccaaaacccatccattttggtcaaatgccttaatgttgggcaaaagaggctcggtgagttgtaattcggcatacatcgcatcttcaataacaggaatttggaattgattagcgagctctgctaaacgacgtcggttgttttcaggcatgctaaaaccaagaggattatgtcctgttggaatagttaatatggcttgtacgctttgagattttaagagttcttcaagtgcgtctagacacatccctgtatgcggcgaagtaggcacttctacaatttttcgtcctaaattctgaagaagtggatataagttatgaaaagtagggatctcaagcgctatgctgtcacctgcttgggtggttgccataatcgcgagacttaaagcctccatagtgccatgagtcagcacaatgtcatctgcggatagaaacataccaagctgtaaactacgtctagcaatttgagtacgtaaacgtatagagccgccgggcggtaaagtatagcttttaaaaatatccggctgtgttcgtaaaacctgagcagttaaacgttttaagcgttcaatcgggtagaagttttcaccagatgggcaagctagggccaaattgatatagtcggggtccatctgctttttaacaatttgcgcgagaaaacagctaattcctgaaaggggcactttttcttcactgatataacgctcctcaagatctggcaagtttgaaggtgcatgacaaacatagtagccagactgtgggcgaactgaaattaaaccttggtcttcaagcttccgataagcttcttttacggtattaatactaacttgataatgttgggcacagtctcgaattgatggcaaccgagaacccacaggttgcctgccattctgaatttgaagagtaaggtcatcactcacttttttatatttgtacatatcaatttattaaaaagcaaaaacaatggatacactttatagtgatctcatatttatctcaaacattgtgattaatttagattaatgcttttagcggagatttagttttaaaaactgtgtctattatttttcatattaactgatactgtgaccattaaaaataaaacagtaagatcaaaaaatggtgaggatttaaagcaatattttaaattacaaaatcagtaggagaggtctatgtctgttgttgcatttaaacaagttgatgtttttacttcacaagcatttaaaggtaatcctgttgcggtgattatggacgccagtaccttaacatctgaacagatgcaggaaattgcgaattggaccaatctttctgaaacgacatttgtgctccctgcgaccgattctcatgctgattatcaggttcgaatttttactccgcaaagtgagttgccatttgcaggccatcctacaattggtactgcctatgctttgcttgaggcgggcctcgtgacagctaaaggcggtaaactggtacagcaatgtggtgcgggtttggtgactctgactgtaagtgactcaaagcatatttcatttgaattacctcagcctaaaattacaccactcgatgcaatacacactgaaaaattggtagagattttaaaatgcgaaattaatactcaatggaatgctacattggtggatgtaggcgcgcgttgggttgtattgcaagcggtcaatgcagaagctgttttagcgactcaaccagactttgcagccttgaaacaacatgatttagaaatgaaagttacgggcgcgactgtttttggtttttatgaaaataatgatgagcaaaaacatatagaagttcgttcatttgccccttcatgcggaataaatgaagatccagtttgtggtagcgggaatggtagtgtggcgtcttttattcgttaccatgggattttgccggcacaaaatgatgtcgtgttttcttcacaaggtcaggctttaggccgtgatggacagctgaaacttgaattgtatcaagataaaattttggtgggtggaaccgctgttacctgtatcgatggcagtatcaccttataaaagaggtattaaaaaaccgaggacttagcctcggttttttaattagaaaaaatcttatttttctacgaacgcacgttcaatgacatagtcgcccatttcacccatacgaggtgattcaactaaaccgtgttggtcaagtaacgcagcaacatctttcaagaatgcagggctaccacaaagcattgcgcggtcagtttcacggttgaaacgtggtaaaccaattttttcaaataaagcaccagtttcaattgcagttgttacacggccttgagtatggaaaggttcacgagtaacggtagggtagtaaacaagtttgtctttaatacctaattcttcaaagaactcattgtttggtaattcgttcaagattaggtcttgataagctaattcagaaatataacgcgtaccgtgaactacgattactttttcaaagcgttcgtaagtttctgggtcacgaataattgacaagaatggagcaagaccagtaccagaagataatagatacaagtttttaccaggtaaaaggtcatcatgaaccaatgtacctgttggttttttagaaactaaaatttcgtcgccaacttgtactttttgcaaaatcgaagttaaaggaccgtcttgtactttaatcgagaagaattctaactcttcttcgtagttcgcacttgcaatcgaatatgcacgcattaacggtttgccattcacttcaagtccgatcatcacgaactgaccatttttaaaacgtaagctagcgtcgcgtgtagttttaaaactgaaaagggtgtcattccagtggtgcacatgagtaatgcgttcaacgttaaaagcagccattaaaggtctcgatcacgattaaaagaaaacaggttgctattctaatctaatttcattcccgataaactgaatatatttaattgtgtttataagaaaaagtgatgatgaattctgtcaccctcccaatagtcgggcacatgtgctcaccttttcgagaaaaatttggtattccacgtcagcctaatttggtcaatatcgagtcttatatcgaaatggtagaaccttataatgacttattagcttttgagggaatcgaacaatttagtcatctttggctcatctggcagtttcatgacaataaaaatcaggagactgcgactaaattccggcctcaagttcgcccaccacgtctagggggcaatgaaaaaattggtgtgtttgcgacacgtagtatgtatcgtccagcgcctataggcttatctgtagtacgtttaaacaaggttgaaaaagtcggtaaatcattaagagtttatgttactggcagtgatttattaaatggcacgccaattttagatattaagccttatattcactattcagatgcaattgttgatgctcaaagtggttatgcgcaggccgaaccagaacgaaaatcggtcttgtggtctgaaaatgcattgtctacccagcagtctctttttaaaaataaagaaattaatgcacaatatcttgatgaattagaaaaagtattgtcattagatcctagacctgcctatcaagaagaccctgaacgagtctataaaatgaaattttcgaattttgatattcattttaaagttaatggcaatgtcattacagttgttgatatggtgaaagacacatctctcgtgtaataaagctatttagaaccaatgtatgttcatccatagcaagctaataaatattgtcatatgcaaaatttgggcaggtatgaaagcaagggcataatgcagtccaccagaaatggcagagttaatgctcttggcaattgcatgaacagcaaagccacccatgaacgcgattaataacgaagtctgagagttatttggttcaccttgtacaatcactgctgcaatagcggcatgtatttcgaataaagaagcaagtagtgtccccgcgattaagcctgcattgcctaaatatagacttaggccataaacccctgcctgaatgagcgtaagtgtcccagcaataataatcgcttcttttaagctgaacattctggtatcgagttcagatgaagtcgtacttagttctgccttacgtaataagatgaaagcccataccgctaaaaaagccaatgcaatgagtgttggaaatataatgagtttgaaccatgccaaacttataccgacgacaataattaaggtttgtaccaatgtggaaacgcatgacattaatgctgcacctgcatttgtttttgcattcgcgcgaccagagcgtacttctaagcctagactcgcgatggtggcagtacttgaaacaaaacccgaggctaaagaagaaagtaataaggcatttttagaggataaaagccgctttgcaatatgtgcgagggcttgtacaaataaaatcaacgtcagtaactttaaaatcacatgagggtttagaacgggtccccaaaaaggtttattgggaactaagggtaaagcaattagaagtagagcaagtaaaaaaatcccgtcgcgcaattccgattcggtaatccattgactggcaatgccgtgcattgattgttttgctaataaaataatcgtcatgatgacggcgagtcccgcagctaacgaaatattccagatacaaagtgccccaataaagtaagtcataataaaggcaagttctgtggtgacaccggggtcatttggctgatttttaagagatacaatactgatcgcgcctataagtagagcgcctacaatcccgattgcggtaccaaataaaaaacaaactgctccgagtaaggaactaattgcaaaagagcgaaaacccgcgaaagttttatattcgtgttttaacttacttcgttcgcgctccagacctaccaataagccgcagcctaatgcagccgcaatagtggtaataaactcttcaaaagatacggtttgtaatgacattgtcattggaagattcataatacttcctctttggtttattgttatatgtagatgtcagccatttaaaaatcatgtattccatttcagtttatgctttttcttgtattgagcctagtctcttttttaatcaaactatcacaataagcatctttataaatatgatctatgacacaaaaaaatactaagttgagaattggattaattatttgaagttcaaagatatttaaaagctaaacttgggttttttatacaggctaaacctaaaacttctctgatatattataaaaatatattggggaaaacacatgaatatacatgtagaaatagacacacattggtgtctagaacaactattacaagaaggccgtatcactgaacgagataagttacttgtacaaaccacaaataggcaaaaagatcagttgaaatggcatccattacagtggattgcgcattttaatttaaaagaccaacatcatgtgcaagcacatttaagtttaaaccgtctgtgccaatggtttgcagatcgggcgcaattacctttatttgtgattgatcctttaaaggcggatgtgagtgctttaactcaagtcatgtcgcaagagtttgcgatccgtaatcatattttagctgtagaagtccacacggaccgaattgtgataggaacagaccagccttttcaaacagactggctaaataatttagagaagagtttagcacccaaaaaaattgaacgtgtatttctcaaccccgagcaattacaacgttatttacgagaatattatcaagtcagccgagcagtaaactcagctcaaaaagatgcggctcatgaccgtgataacaacggtgtagaggcacttttacaacttggtgatagccaaaaccctgatgccaatgatcagcatattgtgaaattggtagactggattttgcaatttgcatttgaacagagcgccagtgacattcacatggaaccgcgtaaagacaatggcaaagttcggttccgtatcgatggtgttttacataccatttataacatgccttcaaataccctgaccgccgtgatttctcggattaaaattttagggcggctaaatgtagcagaaaagcgtaaaccgcaagatggtcgattaaaaacacgtacgccgaaaggacaagaaaccgaactacgtctatctaccttaccaacagcgtttggtgaaaaactggttatgcgtatttttgatccagatgtgttagtacgttcctttcagcaattgggttttgaccagtctttattacaacaatggcagcgtattacgcaaaatagtcacggcattattttagttacggggccaacaggttctggtaaaaccacaacgctatattcttctttaaagcagcttgcaaccgagcaggttaatgtctgtaccattgaagacccgattgaaatgctagagcctagttttaaccaaatgcaggtcaatcatgcaattgaactgggctttgcagatggtgtgcgtgcgcttatgcgacaagacccagacattattatgattggggaaattcgtgaccaagatactgcgaatatggccattcaggctgcactcacaggccacttggtattatcaactttacataccaatgatgcgccgtctagtttgacccgtttacatgatttaggtgtacaaccatttttgactgctgcaacaattttgggtgttctcgcgcagcgcttagtgcgtaagctttgcccaaactgcaaacaacaaactcatattaatgaagatgaatggcagcacctaacatttgactacattatggaaatgccagaaaaagtttatcgggcagtaggttgtgaagagtgccggcatacgggttataaaggtcgaatcggcatttatgagtttatgccagttagtcttgagcttaagcatcttattagcagtcatgcgacattaaatgaattaagaagccaaactaaaaaagaaagtgtagagcctttaagaattgcaggagctcgcaaagttcttgaaggtttgaccaccttggaagaggtattgcgggttgttccattaaattaaatttttcttaagattcacctcatctatcgatggtgtaattgttttattccaagggtaaaccaaataacagagggtaattttatgaaaatgcttaaagtaattttgatgactgcgggtatggcaactgcgggtgtggttgtagcaaatacacctgtgaatcaggcagctattgctccagcgacagttactacagtgaaacaagctttagcatcaaaagataatacacctgtaaaattacatggtcaggtcgtaaaatctttaggtgatgaaaaatatcaattccgcgataagagcggtagcattacaattgatgtagatgatgagctttggcaaggacgtcctgtttcagccaatacaaatgtgactttaattggtgaagtagacatagattataagcctttaaaacgtgtagaaattgatgtggaccaggtccagttctaataaattaatttctatattaattccttttagccgcatttaaatcatgcggctttgctttttttataaagacttggcaacatccaatcaggatataacaggaaaaacagatgagaattttgcttgcagaagatgatcgctctcaagctgaaagtattcaatcatggttagaattagacggttatcaagtagactgggtcgaaagaggtgattatgcccttacagcaattgagcagcatgattatgactgcattttgcttgataggggcttgccccaactggctggtgaaaaagttttaacaaccatccgccacaaacaaaaaaacgttcccgtgatttttattactgcacgtgacagtattcatgaccgcgtagaagggcttgatttaggtgcaaatgattatttggttaaaccatttagcctagaagaattatcggctcgcatccgtgctcaattacgtaaacaaactctgaatcagcaatcgattttaacttggggtgatttgcaacttgatacacaagcgaaagttgtattatgtgctggtaaaactatcgatttaacagcaaaagaatttcaaatattacgtaaacttatggttcatcctgagcatattattacccgtgatcaattagaagaagcactttatgcatggggcgaggaaatcgagagtaacgcaatcgaagtttttatttaccaacttcgaaagaaaatcggaagcagcagtattaaaaccatacgggggctaggctaccgtatgggagacttaaaatgagatcaaatcgttcatccttgcagtcacaactggttaaaaccaccatgtggagcagtattgtggtggggctactggcattaagtttactcactatattttcgatttatcacaacatgtcagtacaagatgaaatcatggatgaaatttcagataccttactggtttctgacctttctaaacactcgatgaagcagtttgatgagctgagtgatgagtttgatattcaatatgagttattagatacaggtcaggtgcttacccattctcatacctatcagcatgaactttttgaaaaaggtaatttatcagaaggtttttcatatttttggtttgatggccaattatggcgtagtctggctgcacaacaagaagattctcaactacaagttgaagtttttcagcctatcagtacacgcattgaagaggtattgaaagcactagctggatatagcggccttatggtgctgttctggttactacagtgggttattgtaagttggcgtaccgagcaacaattggctgcgctgaatttactctctaaacgtattgctcaaaaaactgcctcaaacttagagccaattcaagaaccagatgttattacagaaattcagcctgtgattgatgctttaaatcagctacttgcaaggctacaaagggcactggttgctgaacagcgttttactgcagatgcttcacatgaactacgttcacctttatcagccatacaaatgcgtcttcaggtgttgcaacggaaatatcagcatattccagagcttgatcatgattttgagcgtattcaagaagacgtttcaagaagtacaaaaatactggaaaatttattgttactcgctcgcttggaacctaatgaaacagagcaattagaactctctaagagtgtcgttgatttaaatcatgtattagctagagtgatagatacagtaaatattgatgcacaagccaaacacatggtaattgggacaaacattctgtcaaatgaaaccaaaacatttgcaaatgaagagctcatgtttattgcttttagaaatctatttgataacgctattcgttatagtccggctttgggtgctattcatgttgagctaagccagtaccagcaaaagctgaagatttctatagaagatactgggaatggtgtggatgatgaggtcttaaggcgtttaggacagcgtttttttcgtgtattagggacaaagcaacaaggctcagggttagggttatcaattactaaaaaaattattcaactccatggtggggaattacattttatgcatgcaagccaaggtggcttaaaagttgaagtaatactgccttttaaccgtgaaatacaaaaatagcatggttacccatgctatccattttttgttttcccacgaatattattgaaacgcgaggatcgttcttatttagttaaaatgagacggttattgcgagtaaggcgtaaacgatattcctcgccagcatgcataattcgaatttcacgacctaaggcgaataggttgttagaatgcagcattggtaaggcatgagctgaatctgtattgcgtgtaaataagctaaaaggtgcgttcatttgttgtgctccgtggtatattcttgaacgatttaaatgataatcattatcgaatagatctgtcaatgagattttaaagattttataaattgataaaatttgcttacacttgtgaaaaattttagtgagtagaaaaatgcccaaaccgattgtcgatgtcgcaatagctatcttaattcatcgtggaaaaatattagtgggatggcgtggtgaacagcagcatcaaggtggaaagcatgagtttcctggtggaaaggtagagcagggtgaaacgcctgaagaagcctgccgccgtgaaatttatgaagaagtcggtattggtttaaaagattggcatcaatttgattatattcaccatgaatatgatgacattattgtcaaccttcatttgttccatagttatgtacctgatgagttattaaatcttatccatcagccttggacatggtacacacgtgaacagctacttcacctaaacttcccgaaagctaataaagacattattaaaagattatattggcctcattttattaaaattagccatacacttacatctgtagagaatagtgatgctttattatattggcgtatagaagatgaatttggcccgcgagaagtagaacaattaacggccttagatgaagggcaacgatcaaatttaattataaatgtagatatttggcagcaattgaaccccgagttaaaaaaacagatcaagactgttcatttaaaacaatctcagctcatgagtttacataaaggtgatttagaggtaggagtacgttttattgctgcttgtcacgatgcagtttctttacaacatgctcagcaaattggctgtgatgccgtttttgttagtcctgtaaaagtgacggctactcatccggacgttagtgcattaggatgggatcgttttgctgatttaatcgagaagtgccaaattcccgtatttgctttgggaggcatgagtcctgatgatttagccactgcacaacaacatggtgcatatggcttggcgggtattcgtaatttttaataagaaataaagcattaaaagctagaaagctttcaatgcttgttgtgcttcttgaacagtttttgggttattgcgctgttgtccagcttttaaaatgaccaaccaaagttgttttttcatggcttgactctgcgcaaagcttaaaccacgtcttgcaagagactcagcgttagaatattgctgtttatgatttgcagttaatgccagaaataaataggtctcggctgcctgtggcgctaaacgctgtgcttgaagagcgtagcgctcagcctcggaccattgttggtttttgtaagcctgctcggttttttgcattaaagttttaaaagcgggtaactggcttccatcatcattaaagcgttgcggctttttctgctgaggaacaatcacttgtaaacttttacgttgaatttccggatgatcataaggtgtaatttttacaccagatgaggactcggacttcttcttttcagaaacaggaggtgttttctcttttggagctgaatgatctggtaaagttgtacagccgaccataagtacagcaccaatataaaaaacacctttctttaacatatcctgtttcctgttaacgcttagttgttataactaccacttgaaatgattcgtgtgttattcgacagatcttgttccatctggttttcactttcacgaatataactgtcggtattatcatcctgaggctcaggaattgtgttatcactttgtggcgtatatgttggatcaacttgataatacggtgctccacatggcgtagcacgatgtgggactgtatgcgctagcattggaatatacatggcaccatcacaagcttgtgctgataagtcacccgatgcacggtcaatccattgccactgtacagagtctggttgacgtaagtttactggtgtctggcgtaattgtttcatcacattaatccatactggtaatgcaccagatgaacctgttaaaccagttactttattgtcatctaaacctaaccatactactgcaacatgattacctgaatagccggcaaaccatgagtcacgtgtatcgttagtcgtacctgatttacccgctaattttaaagctggagataagctgttataggctgcacgtcctgtacctgatgacatgacctgttgtaaaccatagttcatgatataaccgacagatggatcaatggtttgttgtacgtttagaccataacgatcaagtaaacgtccatttgcatctacaacagaacgaatcgcacgagtcggatatttgaaaccgcctgtagcaaagttttcataaatacccagtacttccattggtgacatattgactgcaccaaggaaaatagaagggtaggccgggattgtcgattcaacaccaaattttcttaaattgttggtaaatgtagataacccgaactcttgacctaagcgcacagcagaaaggttataagaatttgctaaggcttcacttaaactcacaattccatgaccaccgccgctatagttcttcggtgtccaacttttaccgccgtctactggaacactaattggagcgtcttcaatctggcttgcccagttataacgtccagattcaattgcgctcaaataaatgacaggtttcaataaagaaccgacttggcgttttgcatctaaggcacggttaaagccggtaaagtcttgcgttgacccgacagctgcaattaattcgccattttcaggatgggcaatcagtacagccccttgcaggtttttcaagcgagcagggttgctattagctaagcgctctacagaagctttaaaggcattttgaacttgtgtttgagcaattgggtccaaggtcgtaaaaatacgtaatccttgattggttaaatcactttcctgatattcggtacgtaattgacgacgcacaatatctaaaaagtcagggaattttgctggacctaggcttggtttgcttagaacatttaaaggacgcgcaatttcagtttcatactctgcttgagttaaataccccatgacacgcatgttatttaatactgtatcgcgacgattttttgccccttcggggtttttccaaggattatataaagatggaccttgaaccaaaccgactaaataagcttgttgtgcaacattaagctcacgtagtggtaaaccgaaataaaactgagaggccaatccataaccattgattgaatagttaccgttttgacctaaattcacttcatttaaatatgcttctaaaatttcatctttgctgtaatgcaactcaataagtaaagccattaatgcttcattaactttacgtttaagtgtgcgttcaggggttagatagaagtttttgactaactgttgggtgagggtcgaaccaccttggcgacgtcctccagttacattacttaccaaagcacgtgctgtaccacgaatcgaaataccgtggtgatgataaaagttacggtcttctgtagaaattaaagcttcaataagtggtttaggaacactattaagcttaatcaaaacgcggtcttcattatgttgaggataaatgcccccaattaataaaggttctaaacgggcaactccagttgaggaaggttttgtactgcgaacttctacaacttggtcgtttgcaaaactcagttctaaaacctgttcagactctacgctgtcgccatagtcgaaaccacgtgtatggacatacatgttgctgccttgagcaacataggttccagacttgtcataattacttgaagttttgtaacctagtaattttaattcttgggtgaaatttgcttgagtaattggcgcattattataaatttccaaaggtcgagcaaacaccttggccggaatgtcccagcgttgtccttcaaatttttcacgtataatattatctaaacgaatcagatagatactaagagcaataaaagcaccaatcaccaaaatggaaaaaattagcgcgaagaaaccgataccacgttcaaacttcatataaatgagataaaaccctaaacaatgcgttaatgatgcgatagcttgtcatcaatttgcaatgataaaactgtgaataaatggaaaacttagattgaattttacagtatcttgttgttatgtttttttaaattaatctggttaatgttatgatagcgtagaatcgcagcggagcttactcattcgtgcaaatttcacataagtccttcagaaacgtcgggttaattggtcgaccagataaatcatcagttgtagaaacactatgtttaattcatgaccatttgctaagtttaggcctaaaccccatttttgatcaggaaactgccgaattagtgccctatgatcatgcgcaagtcgttagtcgtcacttattaggtgaagtcgctgatctggtgattgttgtaggcggtgacggttcattgcttcatgcagccagagctttagtgcgctacaatacgcctgtaatcgggattaaccgtggacgtttaggttttttaaccgatattaagccttcggaagctatttttaagcttgatcaggttttacaaggtcatttccagcttgatcgccgtttcttgcttgaaatggaagtacgtaccaatggtgaagtcatttatgacgcaattgctttaaatgatgtcgtactacactctggtaagtcggtacatatgatcgattttgaactcaatatcgatgggcaatatgtttatcgccagcatagtgatggtttaattgtttcgacaccaaccggttcaactgcttatgctttatcaggtggtggtccaattttacatccaagtatggatgctattgcattagttcctatgcatccccatacattatcttcacgtccgatcgtagttggtgggcaaagtgaaattaaaatcgtcattcgcgaaaatcgggtattaccgatggtaagtgcagatggacaacatagtgtctctctcaatgtcggtgatagtttgcacatccgcaaacacccatttaaattaagtttattacacccacctggttatgatttctatatggcttgtcgtaccaaattgggttggaaccaagattttgaatcttttcaaagagatgaatcatgaatattgaacaaatgctatctgttttaaaccctgagattgtagagcgtttaaaaacagcagtagaaattggtaaatggccaaatggtgttgctttaacgaaagaacagcgtgaaacatgtatgcaagctgttattgcttgggagttaaagaacttaccagaagaacagcgtagtggttatattgaccgtggtactaaagaagagggtgaggtttgtgaagatgatcatcacaagcatgagcctgaatttaaaccgattcgttttgtttaaaacttaataagacagaaaaattatttttggttattccatacagccttatatagcatgtttttcataagttatagcatataggcttttattacttttgaaggatcaaaagtaaccagaaatcctctgtatcactgacgatacttcctgtatcgcagtgatacggtcgacatccatgtcgaccttcacgatagcatttgttaactacgaattaagattgcttaaatttcgtgtttcccataatacttttgctttttgcatcgcttcctcgaaattagaaactacgcccatggtatataacgcaatacccatggtttctgttacggccatttccccatattcgtgatgctgttgaccaagccagacagctttaaaggttgctaagtctaactcttcttcaattgggctacgttcaggtgtaagctttggcaactcatgctcatagagttcaccatttttaattccgcaaatcagcgttttcgcgtctgggtttcgttcaaattcgccgccttcgcccttaataactgcgctattttgatagcctaagcgaagtgcactatgctgatgggaagttctgtaagcaggatggaatatggcttgtaaggtggctttagcgttaaaaggattaattaaacgggctaaagtatgaataggtgaacgcaatcccatgacatttcttagagaaatcagttcgcttaaaactggtgaaattacttctaagggtaggtaagcgaaattttgttctgccaattgggtgcgaacttcttgttcagaatgacaaattttataatctaaatattccaaaacttgttcggtataaacccggtttatggtatgcccggaagcgccatgcattacgattttataaccgtgatgagcaagggtaagagccgctaataagaaccaaggataatgtttacgtttaccggcataagaggaccaatctaagtcaacttctaaaggtgcaaaatgaagctggtcttttgtggcttgtacaaaacctgcaagttcatcaatcgattcttctttaacacgtagcagcattaaaaaagcacccaactggacgtcaagaacttcgccttttaaaatcatagtaaaagcctgataggcttcttcataactcagtgagcgagatccagttttccccttacctaaaatacggacatattgagcaaagggatgttcagcatctttataaatattacgtttagtattcatggcaattcaaaacagtaaaaataaggggagtaggcagctcaaaatgaaatgtctacaaggacttatcaatatgacataaaaaactgatgaaaaaatatcaaaagtgtttctcatactaaagtcttaaggctgcatgagtattttttgtgcgtattagccaaaattttaatcgaatcgttatttaattcgagtaaacttcatgtgcttttttgagcactcatatcataattttctgtgattctcctatatcttcagctttttattgaaaaagtaagaggttatttctagctactcaaagtagttagaaacttcaggtattctcctgttttagaaaacagttttttgttttcattgaggtagtaggaaggttttttgtttctaaaaaaccgtttcccttttgcggtgttcatgtgaaaggttagggctgtgtattcgtaaagaatagacgtttcattttgatatttccaacggacttggaaatatagattgaagtaaagttatggctaaaaaaccgatttataaatcactttattttcaagtgattattgcgattattgcgggtgttttggtagggcatttctcaccaagtacaacgcaaattgttaatggtgttgaacaacatattccaggtttaggtgagcaactcaagccattaggtgatgcttttattcgtttgattaaaatgatcatcgcacctgttattttctgtacagtagtaagtggtattgctggtatggaaagcatgaagtcagttggtaaaactggcggtgttgcgttgttatacttcgagatcgtttcaacaatcgcgcttctgattggccttgtggtgattaacattgcaaagccgggcgtaggaatgaatgttgatcctgcaactctggacacttcaggtatccaaaaatacgtcacttctggtgagtcacaatctaccattgatttcttgatgcacatcatcccagatacggtggttggtgcatttgcaaatggtgaaatcttacaggtccttctttttgcaatcctatttggttttgcgctccataagttaggtgatgcaggacgcccagttttaaagttaattgatcaaattgcacacgtgttcttcaacattgtgaatatgattatgaagcttgcgccaattggtgcatttggggcaatggcgtttactatcggtaaatatggtgtaggttcactggtacagttaggccagcttattatctgtttctatattacgtgtttactctttattttcttaattttgggtacaatcagccgcattagtggattcagtattctgaaaatgattcgcctgattcgtgaagaactattaattgtactgggtacatcttcttctgaatcggtcttaccacgcatgctccgtaaacttgaaattgcaggttgtgaaaagtcggttgttggtttagttattccaacaggttattcatttaaccttgatggtacgtcaatctatttgactatggctgcaatctttattgctcaggcaacgaatacacagcttgatattcaacatcaaattactttgttgttggtactcctaatctcatctaaaggtgcagcgggtgtaacaggctctggctttattgttatggcagcaactttatctgcagtaggacatattccggtagctggtttggcattgattttaggtattgaccgcttcatgtcagaagcacgtgctttaaccaatcttgttggtaactctttggcaacgattgtagttgcaaaatgggtgggtgctttagacaaagataagctcaatgatgctttaaacaacccagatgaagttgacagaaaaatgttggctccaaaaaatcctcaggttgcagaaggtttagattaattcagatctacctatataaaaaaggaagctttggcttccttttttattggctgactgaaaagtacagtttaaatgagcagctaagccatgacagttgtgtaaaaaatgattagcatgcacagcaatgagattcgataaaacaataaagccgaaggaaaatattatgttggcatatgatgcagatttagaattattccgtgataattttaaacgttttatgaatgagcatattgctccacattatgaccaatgggaacgtgaaggaattatgccacgttcagtttggtctcaactgggcgaaaatggttttttatgtgtggatgtcccagaagaatatggtggttatggcgtcccaacgtattattcattaatgttagttgaagaatcggctcgtgctggattttgcgcattatcaactgctatttcttgtcactctgagattgcggcgccttatattttacatattgggaccgaagaacaaaaacaatactggttaccgaaaatggtaacaggtgaagtagtcggagcaattggtatgacagaaccgggtgccggttcagacttacagtcaatgcgtaccagtgccattttgcaagatgaccattatttgctaaatggttctaaaacgtttatttcaaatggacaacatgctgatcttgtagtgcttgcagtaaaaaccgatccgcaagcgcgtgcgaaaggtgtatcgttattattggtggatactcacctagaaggtttcaaaaaaggaactaacctcgacaaaatcggattgcattctcaagacacatctgagctattttttgacaatgttaaggttcctaaaaatcagttactcggacaagctggacaaggttttgcttatttaatgcaagaattaccgcgcgaacgtacggctatcgcatcgacagcggtcggcgctattcgtggtgcaattgatttggcaaccgcttatgtaaaagaacgtcatgcatttggtcaacctatttcacagttccaaaatactcgttttgttttagcgcaagcaaaaattgatgagcttgcgacaacagctttctatgagcgaaatgttgctttatatcaagaaggtaaacttgatgttgagacggctgccgcactgaaaagttttagtacagatatgcaaatgaaggttgcggataacctattacaactgtttggtggttatggttatatgactgaatatccaatttcacgcttctttgtagatgcccgtatccaacgtatttacggcggtacaaatgaaattatgaaagaaatcgtagcacgtggattaatcggcaaagcttaataatagtttcaaaaaaagcctacctttgagtaggctttttttattatttagctgttttctgcgatggttcatcgaataaagatttacagctttctagattttggcatgaagcaaacataagcgctttaggtaagctcgcatacaaattggtgatatgctgttcagcaggattattgaaatgccaataagtaaattggtctgaacgcttattttctaagactttaaagaaatcgtctttattaattctttgattaaactgggtatgtggcccaccttgttcatgtgtaccgactgtcgtcattagcattgggaacacggtttgcttttgactttgccattgttctaattctcgaaataacatgccttgatcaaaccagagagaaggacttgcagcaaagtaacgctggaatgcagtaggtttttgaaaaaaatgataaagcacaaacaaccctccaaaagaatgcccatagagactttgctgttggctattaattggaaattgtttagcgatttcaggcttaagctcattatttaaaaaagcaataaactggtcagcaccaccatatttatatttaccttgtgcttgaaactcggcagaaggttttggggtgtaatcataagcgcgtttttgcacatcaaaggttttttgctgaggatagcccacagctacaataatgagcggatctaaacctaattttgcagaacctgctccaatcgactgggcaatatttattgcgcttggaaatgttgcattaccatctaatatataaagtacaggataaccatgttggggtggggcaacaggtggtttataaatttgaataaggtattcatgtccagtatttttagatttgatttggaactgagcctgattgttgtgaaaatcgatttttgattgattttttacaggggcttgagccaaaacggaactacttattaaaaaacctagaaagaaattacaagataaaaagaaaaaagatttaagcatgataaagttaagaaaatattataagtcaaataataaatgaaaatcattatcaaataaagtggtcttatacaaaggttcgagccggattaatgaaaaaagcccatacacccatattgcctaacaaatcaaagccgactattgttatactctcgtttaaaagatgattttgctgaggctgccttccaatgatcaacgatgatcaaaacaaaacgacttctcttagtttagaacaaattcgcgaagatattgatagcgtagatcaacagattcaagagttattaaatcgccgcgcaagccttgctgaagctgttgcgaaagctaaatttgcttctgaagagaatcctttgttttatcgtcctgaacgtgaagcacaagttttacgtaaagttatggagcgcaatcaagggcctttatctgacgtaactatggcccgtttgttccgtgaaattatgtctgcttgccttgctttagaagctccgcaaagtattgcatttttaggcccagaaggtacttttactcaatctgccgtacttaaacattttggtaaagatgcggttgttcgtccgctaccaactattgatgaagtattccgtgaagtagaagcgggtagtgcgcattacggtgtagttccggttgaaaactcatctgaaggtatcgtaaaccatactttagattgttttaaaacttcgaatttaaatgtgattggtgaagttgaattgcgtattcatcatcaattccttgtttctgaaaatacacgtaaagatagtattaagcagatttatgcgcatcagcaaactttggctcaatgtcgtcagtggttagacgcacattatccgggtgttgagcgtgttgccttaaactcaaatgcagaagctgcacgccgtattcgcaacgaatggcactcagcagcgattgcgtctgatattgcagcaggcatgtataaccttgaaatcttgcatagcaatattgaagataatccggaaaatactactcgtttcttagtgattggccgtgaaaaaattccacaaagtggcaatgacaaaacatcgttattaatttcagcgcatgaccgtgcaggtgctttattagaaattttagcgccgtttgcaaaacataatatcagcttaacgagcattgaaactcgcccagcactacctgaaaaatgggcatatgtattctttattgacttagaaggtcatatcgatcaggaaaatgtggctgcggcaatcaatgagattcgtccaatggtaaaagaacttcgtattttaggttcttatcctgctgccgttctttaatcactcatgttggaataatgacatgtatcaagatgggcatgtcattatgcttaaaaaacaaattgctcaaaggtttaaataacgttgagcaaaagcaaagttgaagttatgtcacaacccctatttaaaaaagttgcatttattggtttaggactcattgggtcgagtttggcacgggttattgttgccgaaaagttggcgacaactatagtggcatctacacgctcacagaaaactttagaagatgcaaaatcacttggcttaatacaagaagggttttccgatcctgttgaagccgtgaaaggggcagatttagttgttttagccttgccagtgcgtgccactcaaaaagtgcttgagcaaattaaaccttatttgtcagaaaccacaattgtaactgatgtgggaagtacaaaaggtaatgtcgtagatgcagcaaaagctgtatttggtgaagatttaccagcagggtttgttcccgggcatcctattgcgggaagtgaacacacgggtgttcacgcaggtaaggtcgatctctttgcaaatcacaaagtgattttgacgccattaccaacaagtgcagaatgggcagttgagaaattgattcaactttggtcagctgctaaagctgaagtgatatgtatggatgtcgccaaacatgatgaggttttggcgcataccagtcatttaccgcacttaatggcatttaatctggtcgagcaacttgcaaaccgtgaagataaccttgatattttccgttatgcagctggtggtttccgtgacttttcacgaattgctgccagtgatcctcaaatgtggcatgacattttctttgccaataaaacagctatattaaatgctgtagatggcttcgagaaacaacttaccgtacttagaaaattgattgaaaacgaagattctcatgcattaatgggtttactcggccatgctcaggcagcacgtcagcatttcaatcatatgttagccaaaaaacctttaatggagaaaaataaggtgacacagcaattcagtatcttaccgggaaataaggcttttaaaggtaaatttaccgtaccgggtgacaaatctgtgtcacatcgctccattatgtttggtgctattgccgaaggcacgactcatgtaactggcttccttgaaggtgaagatgctttagcaactttacaagctttccgtgatatgggtgtaagcattgaaggccctaaaaatggtgaagtgaccattcatggcgtgggtatgtatggcttaaaagcaccagcaagtgccttatatatgggtaactctggaacaagcatgcgtttgctttcaggtatgctttctgcacaaaagtttgattctgttatgacaggtgatgcttcgctctctaaacgtccaatggagcgtattgctaaaccattacgtttaatgggtgcgcaaatccaaacgacaggtgagaaaggtacaccacctgtaagcattactggtggtcagcaattaaaaggtattcaatatgatttacctatggcatctgctcaagtgaaatctggtattttactagctggtttatgggctgaaggtgaaacttcggtaactgagccggaaccaacacgtgatcatacagagcgtatgcttcgtgcatttggctatgatgttaaaactgaaggcaataaaatttcccttgtcggcggcggtaagttagtgggtactaatattcaagtaccatctgatatttcatctgctgctttcttcatggtgggcgctgcaattactgaaggtgcagacgttgtacttgaagctgtaggtattaatccaacacgtactggcgtaattgaaattttaaaacagatgggtgctgacctgactgttgaaaatgagcggatcgctggtggagagcctattgctgatattcatattaaaggttcacgtacccttaaaggtattcatatgcctgaagaccaagtacctttagcaattgatgaattcccagccttatttattgcagcggcttgtgccgaaggccaaacagtattaacaggtgcagcagagcttcgcgtgaaagaatctgaccgtattcaagttatggcagatggtttaaaaatcatgggcattgattgcacacctactgaagatggcatcattatcgaaggtaaaggcaaatctggtgattggtcaccaatctttgctggtggtgaaattgaatcacaccatgaccaccgtattgcgatgagttttagtatggcaggtcttcgtacttctggtccgattacaattcacggtactgagactgttgctacaagtttcccaacttttactgagttggcgaatcgtgcaggcttaacgatagaagttagccaataactttttacctgacacattttataattgctaacacaatagcaacggcagcagcgagctaaaggcttggctgctgtttgtttattgcttatgctaagtgcagataatgataaaagtgttaggacaaaggatgaaaaaattacaatttattgccagttgcccacaacatggggtgcttgatcatccaccaaatgaatgccatatcactcaagaatatgtagcggctttactgtttaaacaattggggaattatggttttgatgcacagcatattgtgcatgaacatgaaaaggtggaagtaagtattgataatcaccttttaccattgtctattacttgccagcaaacagaccatgatgggcatttaatgtgtgaaatctctgccaatcctgatgaagaacaagactggtttgagaaaatcgaaacacaaagtattattcgtcagcttgcacaggctgttgaaaatagcttgaaagccgatcatagcttttcagcatttgagtggaaaagctaaacatattattgttaagacttatttgtgaagtacggctttttagaaaagtcgtacaatttctttaaattaaatataaaaatacaaaatctttcccgaaatcgctacctatctttaatgctttgtgtatattgaaattattaagatatttacataattagagtgtagttttcatgacacaagttgatattgcagcattatctcctcaagtcgtttggcagcattttcaaacactttgtactattcctcgtccgtcaaagcatgaacagcaacttcgtgagtttttacaaaactgggccgaaagtcggaatttagaaacttatgtagatgaagtaggaaatttgattatccgaaaggatgcaactgccggtaaagaacatgtgtctggagttattcttcagggccatttagatatggttacacaagccaatactggtacggtacatgacttttttaaagacccgattcgtccagttcttgaggatggctggctaattgccaaagacactactttaggtgctgataatggcattggggtggctttggcattagctgttttagattcaaatgatattgctcatggcccaatagaagttcttttaacagtcgatgaagaagcagggatgagtggtgcgcggcttttagagacaggtgtgctaaaaggaaaatggctatttaatattgatacagaagagtggggtgagttgtatttggggtgtgctggtagtattgatgttgaggtagagcagccgcttagttatgagccaatccctgaaaatttgaatattgttaatattcaggtggctggtcttaaaggtggccactctggcgtagatatccatttaggacgtggcaatgccaacgttattttggctcgctttttaaatcaacatttagcctcactgggtgggtatcttgttgagtttataggtggtacagctcgtaatgctttaccgcgagaagcagtggcaactattgcaatttcgcctaatcagttatcaagcttagaaaagttacttgctgaatatcaaacgacatggaaaaaacagctaaagggtattgatgacaacttgcaattaagtattcaatccactggtgttgaagtgaccgaagtgattaatcaacaacagcaaaatgaatggttgcaagctttagcaacaagtccttatggggttgcaagtatgagtcaggttctaccagatgtaattgaaacctcaaataacattggggtggtgagactaaatcgagaaggtggaaaagctgtcttaatggttcgttcaatggtgaaccaagaagctcaagattttgcagaaaaaattcaggcacattttagccagtttaatatcggctctacacttacgccgttagtgtcgggttggacaccaaatccagattcggctgctctaaagtgcttacaacaagcctatcaaaatgcatttaatattgagccaaatctaaaagtaattcatgcaggcttagaatgtgggattattgctgaacattacccacatttacagatggtttcgtttggaccggatattcaaggtgcacatgcaccgggtgaacgagtcaaagttgatactgtagagaaatgctggaagctactggtaaccgctttggcatctgtagagtaattttttaagagataagaagctcaattatgagcttcttaaacttttatatggaaatgatatgtagctaatttttactcgatttttaaaagttgtcctgtttcacttaaagtaaactcatcaaaatcattcgctaaataaaaatgacctttataaaactggcgaacttcttcggtaatagcttgctgcccagttttatcctgatgtctagggctaaagtgtgtcagaattaaattgtctagagattgctgctcagcaaattcagccaccatttttgctgagctgtgcattggtcctttacctactttatctaagactgtttgcaaataagttgcttcatgaataagtaattgagcatccttacaagtatcggctaataattctggccgatcattatcaccacctataattgcatgaatctgctgtttttgaattttgataaagtcttgagattttaaaattcgcccctcaaactcaacatcgtagcctcgttttaaatgcccccaaatatcgcctttaggtacgccaagctgagttaaagcttgaatatctatcttcttctgggtggattttatataaatactaaatgcaaaactcggaacacgatgacttagtggatgtgcttgaataaagagttcatcggtgagctgctgtggccgagttgcttcattaacatcaataaattttattgaataaggcaaatgtaagtctgtaagttgagcagtgatttcaaaccattgttgaatttctttgggcgcaatcacgattaatggttttgtacgggcattcatgcctgcacttgccagtaaaccaactaggccataacaatgatcgccgtgaacgtgtgtaatacaaatggcaattaagttttgtagtgagagtctagcttgctgaatacgatgctgtgtaccctcaccagtatcaactaaaatccagtccttatttttactgttacgaacagctaatcctgaaacattgcgtgaaagcgtgggtacacctgatgatgtgcctaaaaaggtaaaatgaagcatattcttggaattttttagtcaaatgcgtaatttttatattatagacacttattaaaattttataaaaattatagtagatggtagtgaccgagtaaaaaatatttggcgcgttttggcttaagttggaataattttcaatcaggacatggcttgaaaatgatgggcatactctcaagttatgcccatcaaatacactttatttcatgataataaaacgtgtaatgatttggcgaagctgttttaaataacctgtaaagaagtggttagcgcccggcaaaatcgtaattggatgcttttgaggttttgcccactcaattgcatctgaaagtaaggtgatgtcatcttgctcaccatgaatgagtagaatatcaccttgaatttcaggtgttttatagtgacgtaatcccacaacagtagctgttggtaaaccacataaaattaactgtattggctgtaattcagggctaagctgcgcatgacattttgccaaaacatgtgagccaaagctaaagccacctgcataaaatggcaaacctgcatgaagcttacgaacatgctcaatcacagctaaaatatcttcagtttctccatgaccttcatcatgaacaccttcactgccgcctaaaccacggaaactaggacggtaaacaatacagccatattcattaaagatttgggttaaaagagcagggactttatgttgaggggttccaccttgtaatgggtgagggtgacaaacaactgcaaagcctttgatttcaccttcaggacggtcaacgaaaagttcaattttacctactggaccctggatgaaaatttgctcagacatagaagaaccgctaaataacaatacgtaagtgctattttaccgatagtcgtcattgaaaacacgagttagcattaaaaaatatctactgttatagttggcattaataataatttttttcaggttgtctatgcttgctttaatttctcctgcaaaaactttagattatgaaacagcgttacctacagatgagtttactcagccgcgcttgttagaacactccgcacaattaattgatgtttgccgcaaactttctgcttcggaaattgcgagtctaatgagtgtcagtgaaaaaattgccacacttaatgctgatcgttttagagactggaagccagaatttgatttttcaaatgctcgtcaggcaatttatgcatttaaaggggatgtttacaccggtttagatgcttatcatttaaaagacaaagatattgattttgcccagcagcatttacgtatgctctctggtttatatggtttattgcgtcctttagatttaatgatgccttatcgtttagagatgggtactaaattaaaaaatacgcgcggtcacaatttgtatgaattttgggatgatattatcaccaatcggattaatgaagacttggcagcaattaaatctgaattgctggtaaatttggcttcagatgaatattacaaatctgtcaatgaaaagaaaattaaggctgaaattgtgaagcctgttttccttgaccagaaaaatggcaaatataaagtcattagtttctatgcgaaaaaagcacgtggtttaatggctcgttttattattgaaaaccaattaaataaagctgaagacatcaaagcttttaatactgaaggttactactttgatgctgataactcatcggcaaaagagttggtgtttaaacgtgatgagcaataatcctaagcgtggttaataaatgctgatgcagctttacttattaaaactggaacttttttggtttgaactgcatcagcattatcatttttctgaaccgcagaaaattttaaatgaacttattgctgcttatagtgaaaagcagcgagcctaccacaccgtacaacatttatatgaatgtttgagtttaattgagacgattcagtccgaattaaatgatccatatgctgttgcattggctctctggttccatgatgtagtctacgaacctcaagcgctagataatgaacttaaaagtgccgagttatttgagcaattgatggctcaagatttacagctcgatacaatgcagaaaataaagcgttggattcttgcgactcaaaagcatgcaccaaccgatgaaacagatttgcaatttttgttagatatcgatttagctattttggcagcaacacctgaacgttttatccagtatgaacagcaaattcagcaggagtattcttgggttgatccagaagtatattcaattaagcgaaaagaagttttaatgaatttttatcagtctgagccgctttatcaaactgcatatttccaaaagaattttgagttaaacgccaagcaaaatttaaagaaaatattggaatagcctaagctaaatataaaatttaaatctgttgattgaataaagtgatatagatttttaatcttttttgaaaagtgaaaatggttacatgaggggaaagaggaaccactgaaaaaaaaacagtgattccttagaaataaattatttaaagaaataacctgtttctggtgaacttgcatttgccatgcgtttgcgtggcatacgcccagctaaaaatgcttcacgtcctgcttcaacagctttcttcattgcagaagccatcaaaataggattttgagccgctgcaatcgctgtgttcatcaatacgccatcacaaccaagttccatcgcaatagcagcgtcacttgctgtaccaacacctgcatctactaaaaccggtactttggcattttctttaataattgaaatggtatgcgggtttaaaatacctaggcctgaaccaatcaaactacctaaaggcataattgcaacacagcccatactttcaagttcttgagcaatgattgggtcgtcagaggtatagaccataatctcaaaaccatcatcaatcaaagtgcgagcggcttttaaagtctcggttacatttggatataaggttttttcatcacccaacacttcaagttttactaggttgtgaccatccagtagctcgcgcgctagcatacacgtgcgtactgcgctgtcagcgtcaaaacaacctgcagtatttggcaagattgtatatttttctggtggaatgacagaaagtaaattcggttgatctggattttgtccaatattcacacggcggattgcgacagttacgatttctgcaccactagcttgaatggctaaatccgtttcatttaagtctttatatttccctgttcctaccaataaacgagattgaaaagaacgtgaaccaataatgagaggggtgtcttgcatggataactccgacttagccgccgccaacagcgtgaataatttcgatacggtcatgttgagcaatcgtaatttgctctaatttgcttttaggcacgatttgctgattgtgttcaacagcaaaacgttttccttcaagtgccagttcctgaatgagttgcaacaggttttggctaggcgtgtccgttaattcgccatttaaataaatttgcatgatcacattccgattattttgcgtatttgaaagcattccaagccaagattagccatccagcaatcatcaaagctccacctattggcgtaatcgcacctaatatccgcggtaaacccaatgccatgatataaagcgaaccacaaaagaacagaatgccaatctgaataagcaagaaagataacttgattgggaaatgaggaagaaccttgcttaaaataccaagcgctaacaatccaagcgcatgataaaaaaagtagtcggttgcagtctgccaccaagcaagttgttcagggctcgcgtgagctttaagaccatgtgctccaaaagcacccaacatgactgcgaaagcaagattaagggctgaaatggcaatccacataacaaaaaacgcaactgaataatgaaaggcaacgttaccatagaataggttggctaaacatagccagataaaacaaaagggcttatcgcccttttatttttttgattttctttagcttgcagacattgcgactttaattttttccatcgcattcttttcaagctgacgaatacgttcggcagaaacattatattcggcagcaagctcatggagggtagatttatcgtcatctaaccaacggcgctgcaaaatattacgtgaacggtcatctagctggttcattgcgtcatgcaaagcagatgtactttgttcttcccaatcctcattttctactaaacgagcagggtcataacgattatcttcaagatataacactggcgcagtgtgcggggtgtcatcatcgtcatcgccttgagcttcaaaagcagcatcatatgctgttaaacgaccttccatttccaaaacttgttctggagtaacatttaagtcgtttgcaatagattgcgcttcttctaatgtgagctttttactcgatttttttaagctgcgtaaattgaagaaaagtttacgctgagctttggttgttgcaatttttacaatacgccagttacgaataacatattcgtgaatttctgccttaatccagtggacggcaaaagatacaagacgtacgcccatatttgggtcaaaacgttttacggctttcattaagcctaagttaccttcttgaataaggtcaccttgaggtaggccataacctgcatagctgcgcgcaatgtgaacgacgaagcgtaaatgcgacattaccagcatttttgcggcatcaagatcttggtcataataataacgctcagcaagctctttttcttgctcagccgttaaaataggaatctgattgacagtactgatatatgcaccaaggtttacaccgggcgcagacaatgacaggggcatcaattgattgctgctgtcactcatgagttctccttataggataggatggattaaccaataagttcatcttaatttgaatcggcttcataattaaggaaaattgggtatagaaatgtaaaattttatgcagtttctaatcttttagtttagcaaagaattattgagtttcaattaaatagtgaaattctctttctgaaatctgcatggtttgacacgtaaaatgatgtaattggcaataacgtgttacatcaatttcactatgcgggtcagatgattttaataagaatagttgttttcccgataattttttaagttcacgtttcaacattaataatggcattggacaaggttggccaagggcattaatttcaataggcgtcgtagcggaagaagtagtgctcattcatcatcaaaacaactaaaaaaattattttaacaaatttttgtaaacactacataactttatataaagaacaactaatcaatactgataaaaataattgtaataagctgtttaaaaaaacagctaaaaataggggaaataaatgaaaaaaattctattaattgtcataaacccgtgttaagctcgaaccgttttaggaattaccacacagttaaattgttttaataaccctataacaaatggatgtaaccggaaattgttgatagttttacagaatgattacaagctttaagattataaaaattttaaaaccttgtttgctctgctgtttgcaacaccggaaggtccttttttcatcatctgaggattgacttatgacagctcgtgaacaaggcgtagtaaagtggtttaatgacactaaaggctttggttttattcaacgtaacggcggcgacgatgtattcgttcacttccgtgcaatcgtaggtgacggtcaccgttctctacgtgacggtcaacgtgtagaatttagcgttgtacaaggtcaaaaaggttttcaagctgaaaacgttcagcctttagactaattcatctttttgatgaatcatggacgctccaatttttgaattggggcgtttttgtttataatgatcttctcattcgagagattgtttgttagagcgcgtatttatgacatctggttttgaaaccttgaatttacatccgcaacttaaaaaggcgattgatgctttagggtttactcaaatgaccccaattcagcaaaaggttttaaaatatacattagccgggcatgatgcaattgggcgagcacagacaggaacaggtaagactgctgcctttctgattagtgtaattaatgatttgctcaataatccggttcaggagcaacgcttccgtggtgagcctcgtgctttaatcttagcacctactcgtgagttggcattgcagattgaaagtgatgcaaaatctctcacaaaattttctaatttacacctagtgaccctattaggtggcgttgatttcgataagcagaagaagcaacttgatgctaattttgtcgatatcatggttgccacaccagggcgtttaattgattttgtagaacaaaaagaagtttggctcgatcaaattgaatttttagtgattgatgaagctgaccgtttattggatatgggctttattccttccgtaaaacgtattgtgcgttattcaccacgtaaggaacaacgacaaaccttaatgttctctgcaacatttagttatgatgtcttgaacttggcaagacaatggttatttgaaccagtaactgttgaaattgaacctgaacaaaagaccaataatgatgtcgaacaacgtgtttacgttgtggctaaacaggataaatatcgtcttttacaagatattttacgtgaagagccaattgataaagttatgatctttgccaatcgccgtgatcaggtacgtcgtctttacgaccatttgaaaaaagatggatacaaagtggggatgctatctggtgaaattgctcaagataaacgtttaaaaatgttggagcagtttaagcaaggcaagcataacatcatgatcgcaaccgatgttgctggtcgtggtattcatgtagacggtgtatcacatgtagtgaattttacattgcctgagcagtctgatgattatgtccatcgtattggtcgtacaggtcgtgcaggggcacaaggggtaagtattagtttcttatctgaagatgatgctttctatttacccgaaattgaaaaagcaattggtaagaaattgcctctaacccgactagatggttattgctaataaaaaaatcccaatcaaatgagttgggattttttttgattaatttattttacaatagaaggtaagcgttgtttgataatcatcatcttttgctaaagatgcatttttaccagttaaagtaccgatgacacccgcagcagcttctaccatttgaccagtcttttcacttaccacatcttttaaaaccccgtgataagacgttttttcatcaacaataactggtgttgtgctcttagagcatgttttttgtgccgcagtaaccgcattattctttgcaattaaattggttttgccaattccagtcacttcaaactgattattttctttttgaattgctaaagtgtttttaggcgtggttgcacaagcacctagtaataaaacaacaccgctcattgcggtcgctaaaattatttttttcataatgcacctaagttaatcaccaaaagatagggttatttgaacataagttttctaattgattttgaagacgttgtatgagttttgatgttttgtattaaaaaatgtcaaactatgaattcgctaagtttataagctagattcaatggtggattaacggtagattatgctaatctatttcgaatttttgagttagattaatattaatgacggattcagcaatacaaataattcaccaaaatattcatcagcgtcagtctattggtcaattagttgagccagccccaaatacagatcagttagagttggcttttcaggcagctttaacagctccagatcatcatagacttaagccaacgcgttttgtaattgtgtcaggtgaccaacgtgctgcttttggtgaagttctggcaaaagcattggtcgatttgggtgagtctgatcctgcacagcttgaacgagtgaagcaacatccttttcgagctccgctacttattttagctcttacgcaattacaagatcatccgaaagttccacacttcgaacaaattttgagtacaggcgcagcagtacaaaatcttttgttatctttacaagctcaagggttcgcgaccatgtggcgtagtggtgccgttgtcgaatcaaactggttaaaacagcatttaggtctgcaaccgcatgatttgatttcaggtattatttatgtcggcacagcagctaaagcaattgcaccgcgtgcagatattgatagtaaagaattcgtaaaagtttggcaggcttaaacgtctgtaaaagtaagaaataggataataaagcatggctgaatttaagtttacagatttggtggaacctgttgcggtcgataaaaaaacggcattacgtattaccgttttagggggcggtagctttggtacagctatggcaaatttagctgctcgtaatggctgcgataccatgatctggattcgtgatgccgaaacagcagaagaaattaataaaacccatattaataaacgttatttaccagacttcactttagaatcttcattacgtgcagtttctgatcttgagcaagcggtatgtgatcgagatattattttagttgcaattccaagccactcattccgtgatgttttaaaacaaatagcgccttatattactgcacaagctgtggtgtctttaaccaaaggtgttgaagctaaaacatttagcttcatgagcgatattattcgtgaagaattaccagaagtgccgtatggcgtattgtcaggaccaaatctcgctaaagaaattatggcaggtatgccttctggtactgtaattgcaagtgattctgaactcgtccgttatgccgtacaacatgcacttcatagtgcgttattccgcgtttttggtagcgatgatgtgcatggagttgagttaggcggtgcgcttaagaatatttatgccgttgctatgggaattggagcagcatataaaattggtgaaaataccaagagtatgattttaacgcgtgctttggctgaaatgagccgtttcgcggtaaaacaaggtgcaaacccacttacgttcttaggtttatctggagtaggtgatttatttgcgacttgtaatagtccattaagccgtaattatcaaattggttatgcgctaggttctggtaaaacgcttgaacaagcgagtaaagaattgggacaaactgcagaaggtattaacacgattgttcaggtgcgtggcaaggcgcaagaactagacgtatatatgccaattaccaatgctttatatgaggtcatttttgaaggcgctccaccattaaatattgcactttctcttatgaaaaatggacaccgtagtgatgttgagtttgttttacctcatcatgaagtctgacgaataaatgtcataaattgtggttataatgcaggaattgtttacaaggaaattttatgcaactgacattagttcgtcatggggaagctgctccaccagtaaatggtaatgatattaaacgtccccttactgcgcgtggacatgcacaagccgagcaaacggcaacgtttttaaaagatattgtaaaaccagatatttttgttgttagtcctttgctgcgtgctcaggaaacgttggcgcatatccagacctattttaaagatgtgccagtactgttatgcgacaaaattaagcctgacgatgatgcaaaagaagcgattgaatggctatcccaaattccttatgagtcgattgtggttgtttgccatatgaatgtggtagggcatattgcagagttactgactcatgaaaatttcaatccatttgcacttgctgaagcaagaatttatgatcaagctgttattgcaaatggtttatcaacacaaaaaaatagttttatacccacaatataattaaaaaggttatttagcccacatgctgtacatatggatgcctgaaaccaatggagtttggcattggtctaacggagaaaactggttgcaggctgcaagtctcgatcaattaatacaagacttgcaaatacatcaaggaaaagaagctacggtcttttttccgagtcgtcatgctcaaatgcttcagcaaacgatggcaaagtcccattacaaacagcttggcgctgatggggttaaatatctacttgaagagtttgtgactttaccgattgatcacatgaaagtggttcaccattttcatgcggatcagttaactgttttgggtgttgctcagggggtggtagagacatggcaacattctttagctttgttaccaaccaaacttgtggctttgttgccagattttctagttttacctgaaccacaagctcagcaagttattctgtgtaatattgatcatcagcttttggtgcgtgagaataagtggttaggtaattccattgatgacttggggctttttttagagttccagtcagccgaaacacattatcaatatagcggtttaacagcagagcaactagagagcttagaagccgcttcaagcgcagagcaacgttctgagtttgtttatcaatttcagcctttagataaaactaagcagcatccttttaatgttttgccaaaatcaaaagggcaagaacgtactttttctagttattggaaagcttgtgccgccgttgttctagcaattattgtcgtgcagtttagctatgatttattgcgttgggtaaaattgaaaaaggtggcagatcagactgctgaacaggcaattgagcaatataaatattggtttggtccatctagtcgtgtgactgaacaaaatattaaaggacaattcgaaagtcatttaagaatgagccagcaaggtgatacccaggcactttctctgttaagccgggttgggcctattttaatgcaaagacagattttagctcagcaactcaattatgatgcttcaatcttaacaatggcactaaaagcaaaatcagcagatgatttgcaagctttaacccaacaacttaatcaacaaggttttaaagctgagttaggtaatgttcaagctgatggtaatggtgcgattggggtggtgaaaatacaataatgaaaatgttagctcagttgcaaaaccgttttgatcagtgggttgaacaaattgttcaatatttagatcgcttaactgtccgtgaacgtattatggtggtctttactactatttttgttgtagtagtcattgttggatattcactttggaaaatgcattccttggcagaacaacagcaaaaacgtttaaatgatttaaaagatttgatggtgtggatgcagagtaatgcagtcacgatgaagcctgccaatgagcttgaactagataagtctggaaaaatacaacgagtagctcagcaacaaggtttaactgtgtcttcccagcaaaatggggaacagttacaaattgttgtaacacatcagaattatgcaattttggctaactttttaacacaacttgcacagatgggcttaagtattcaaaagatggaaatggtttctagtgaaggtcagattaaattaacagcgacagttcaataacatatcaaaatatgcttgtgtcaagcatggtgttttgtgctgcctgtgcctataatatgcgtacctaaaatcagtagactgtgattggtatgttatattcacttgctcgcccgatgttgtttagtttagcaccagagcgtgcccatgaattaacattatccatgcttgataaagcgcataagctaggcatgatgcgccagaccgtagaagcaaagccaactacatgtatgggaatcgaatttcctaatccggtagggttggcagccggtctagataaaaatggtgctcatattgatgcattagctgggttgggtttcggtttcattgaaattggtacaattacacctcgcccgcaatctggtaacccaaaaccacgtttattccgtattcctgaagctaaagctattattaaccgtatgggttttaataatgatggcgttgataagctaatcgagaatgttaaagcatcaaaatttagaggcattttaggtattaatattggtaaaaatgctgatacacctgtcgaaaaagccgttgatgattatttgatttgtcttgagaaagtttataactacgcttcatacattacggttaatatttcgtctccaaatactaaaaatttgcgtagtttgcaaagtggtgatgcattaactgaattattgcaaaccttaaaagcacgtcaacttgagttggcagagcaatataatcactatgtacctttagttcttaaagtcgctccagacttaacagctgaagatgttgaatttatttcggcacaattattagattttaaaattgatggtcttattgtgacgaacactaccttatcgagagaaggggtagagaatctgccttacggtaatgagtcaggtggtttgtcgggtgcacctgtatttgaaaaaagtacggaatgtttacgtttatttgctcaaacattaaaaggacaaattcctttaattggtgtgggcggaattttgtcgggtgaacaagctgcagcgaaacaacaggctggagcaacgcttgtacaaatttatagtggtctgatttatacgggaccaacgcttgtgaagcaatgtgttgaagccatgacttaattgaacatgaacaccattgatatcatcattctgatacttttgctcattggggggctaaacggtttgcgacaaggatttataaaagcctttgcgaacttggtaggatggatttttgcattaattatgggtgcaaaatatgctgttcttctagctccgtcaatgtcaggtttaagtcaggatccggtggttcaaaagatcgcggctttcgcttttattgcacttttaattatcgttttaacttggatcgtcactgcatttttaaatggcctcttgaaaagtttgaagttggggccattaaatcgtttagcaggtggtgcttttggttcgttgaaaggtttattggttgttcttattaccatgcagggtgttggtccttgggtagaaagttcgcctcattggaaacaatccaaatttatccagtttttattgccttatgcacctttagcgacagagctttctaaagatgcagcaagtgaggcattgcatcagataacatctggaggcggtgtaacgcgcacttctccaaaaccaatggacgagtcggaggaaacagaacttcgacctgaccattcaacaaagaatcctttttattaattcctagcttgtctgcgaggttgctatgtgtggagttgttggtatagccggtaaatcgccagtgaaccaaatgttgtttgatgcattaacgatgttgcaacatcgtgggcaagatgcagctggaatagtaacctgccatgaaggccgtcttttccttcgtaaggataacggtatggtacgtgatgtttttcatactcgtcatatgagagcattacttggtaattacggtattggtcatgtgcgctatccaactgctggttcttcaagcagtgcggaagctcaaccattttatgtgaactcaccttacggtattacacttgcacataatggtaacttgacaaatgcagaagaaattcatgatgacctgttcaaaacagatttgcgtcacatgaatacggactctgattcagaagttcttttaaacgtctttgctcatgaattgcaaaagataggaactttaaatcctacaccggaagatattttccataccgtttcacgtgtacatgagcgctgtcaaggtgcttatggtgtagtggcaatgattactggtcacggcttagttggtttccgtgatccaaatggtatccgtccgcttatttacggttctcgtgtaactgagcaaggcgagatggaatatatcattgcatctgaatcagtagcaattacagcgcttggctttaaaattgagcgtgatattgctccgggtgaagcaattttcattaatgctgacggtgagttatttacaaagcaatgtgcggcagatccaaaataccgtccatgtatttttgaatatgtttattttgctcgtccagatgcaattattgatggtatttcggtttataaagctcgcttaaaaatgggtgagaaattagcgcataaaattttgcgtgactggggtgaagaccatgatattgacgtggttatcccaattccagatacaagccgtacctcagctttagagttggcaaatattcttggcgtgaagttccgtgaaggttttatgaaaaaccgttatatcggtcgtacctttattatgccaggtcaacaacagcgtaaaaaatctgtacgtcagaaattaaaccctgttgagttagagtttaaaggcaagaacgttctattagtggatgactcaattgtgcgtggtacaacgtgtaatgagatcattcaaatggcgcgtgactcaggtgcgaaaaaagtatactttgcttcagctgcaccgaaagtgatgtatccgaacgtatatggtatcgatatgcctgctaaaactgagcttattgcttcagaacgcagtgtagaagaaattcaggaaattattggtgctgatcgtttaattttccaagatttggaagatttgaagaacgctgtacgtacaagtaaagtacctacattaaccgagtttgattgctctgtttttgatggtatctatgtaactggtggaattgatgcagactatctgaataatttggagcagaaacgtaatgattctgcgaaaaagaaaaaagatggttatattgatgtcaatattgatgcagcatcagtagatttgaccggtattaaagaagaatagaaatagccgaaaaaagcgggtatttcccgcttttttcttttatgatgaaacttaacaatgtaattgggattatttacattgaaagaagtaagccactatttaatcgaaaataaaaatatggcatggtccatcactatgtgtttggttgctgtgcttttaactatttttattttaaatctaattttaggtttacttgttcatttctttgattatagcgagccaatttggtggcatgctttaagtccatattttattgctcttttgctttttatcatggtttggtctgtggtgaccgaactttatattttgcgtaaaggtggccattcacttgccaagcagttgaaagctcgtcgtttggtaaaaggtgaaagtacaccagaagaacatgccgcattaaaaattacagaacatctggcacaaacattttccctgaacgttccaacactttatgttttacctgatgaagtaggtgttaatgcattaacggcaggctttcactcgaatgatattgtaattattttaacttggggtgccttacagaaccttgatgagctagagctatatggcttattgggtcatgaatttaaccagattttatcgggtgaagcagtagaaaatactaaactaaaaattttatatagtggtttgactacttttagtcagtgggggagtaagctcgccaaacaagggtttaagcgctacagtccgggttataagcataagttcgagactgtatttgtagccgtaggtggtgtgatttggttagcgggaagtttaggtgttttaatcactcgttttattaaatatttaacattaagtggtcgtacatttcgtaatgaccaaaaaaccatgcggttattaaaaaatagcactaatacccaaactttattgcgtatttacgttcaccattctggttcgcagattcatagtgcttattctgaatcgattgcacatatgtgttttgcgaattcacttagcccgcaaagttggatgaatattcacccaagtattcgtgaacgtatttatgagcttaacccaactttattacaagatttgcaattagaaaatttaaagaaacttcgaaatcgtcctttatttagtttgttccatgtactagaagaatctgagactgaaatttatacgccgtggtcatctccacaacctttgcctttgttgcgtctttctccaatcagttttgctttgaatgatgcaattaagccgttaagcagtgatatccgtcgtaataaaaagcggcctgaacttattcaacgtgcattacaaactgcgactggttcacgtgaggtgatggttgctattttaatgattcgtcaatatcgagaatttattccacaagatgcgccagtaagccatgcaattgtggatgccttacttaatcttgatgggcgtattcatattcagatatttcatgatgcatgtaaaaatattggtcatatgcctgccagtattgctcgtcaatttttgactaaactggcccttattattcaggaagatggggaaattggattacttgatgcacttctactcgagcgtgttaagtacgagttaaacttaatgccacttcatttgccgacagcatttgaagaggtaaaacctcaaattgttcgtttaattgatgcattacttcatgtgcaacaaatcaatagtccgaatcagttagaggttcgcgaacgtatcttacgttctttgcttaatcctgatgaaatgcatatttatgatgaaatttcggatgaacctttagacttagcagaaattttaaatgatattgctggattattgctgcgtgaccgcttaagtatattggcaattgctgaaatgtgcttgtggagtgatcgtattattactcaagatgaacttgatgtgcttgagttgctctattggcgatttggttttgagtctgatgaaattgtagagcaaatgcagaagaaaaatagcgttatgattatttaagaaacatatgtggtttccaaagagtatcattaaaagaaaacgctgaaaaaaaatcagaagcccgttagaatgtgtgtagattagaggtactgatttagacatgattgggcagcaaagaaatatactggcaactttaggaatagacgtatggattcctagaacacaagtgtgccaaaaaaataatgcccatactttgtggcgagatcaggttgttgaacctcatgagtcaattaccgtacctaccatagatgttcctgcttttgagcaaaagaacactcagccacaggtgtttgaaattcctaaagtggtggaagagccaccaatagtagttgcagaagtttcgcagccagagatacttgtagaaaaacctaaagtcattgcgcaagagacaattactccatttgagttacaggcttattgtcttgaaaaatgtgtaatttttgttgatgtaacggctttggaaacagaagaaaaacaactttgggtgaatatacaaaaggcgaaggtgggacaatattctgaattaagatggcctttccctctggcagcctatcaagatcaacgaggggtaggttcttatattcaaggtttcttagatgctgtagcaacagagaaaaagattttatgtttgggtaaatgtacctatattcaacatgcaaatattattcatttagctagtttaaaagaaatgttagataagcctcttcttaagaaaagattgtggcaacttatgcaagataacaatgagtagtagggatttacatgaaaaaggttgtggtttttagccaaattgatgaggaaattttgtcacggttacagcagcattaccatgttgtcgtattgaaccctaaactgggtgatattaatgaacagatacgacaagaagtagtagatgctgatggcatgattggggctggtcgtttgctcaatgaaagtaatctttctcctgcccaaaaattaaaaattatttcttctgtgactgtaggttatgacaattatgatgttggttatttaaatcagaaaaaaatctggttagcaaacacacctcatgttctaactgaaacgacagcagatcttgcttttactttgttattaagtgcagccagaaaagttccttttctagatcactggactaaacaaggtgagtggaaaagaacagttgggccacagcagtttggtctcgatgtttttggaaaaacattaggtattattgggcttggtaatattggtgctgcaatcgcacgtcgtggcttttatggatttaacatgaatattgtttaccataatcgccgcgagaaacctgagttggcggaacctttaaaagctcaatatctgggattggaagaattattacaacaatctgattttgtagtgacagctgttgatttaaatgcggaatctaaagctttaatgggtaaggctcaatttgagcttatgcaaaagcatgccatatttattaatattgcgcgtggctcagttgtcgatgagcaagccctaattgaagcattgcaaaatgaagttatttttgcggctggtttagatgtctatgagaaagaacctctgcaagaatctgcacttttcaatttgccgaacgttgtcactttgcctcacgtaggttctgctacagctgaaacacgtaagaaaatggcaaatttagcttataaaaacttggtggaagcactagaggacaagacgcctagatatttagtgaatcctaattttgtgtaaaggatgaataacacttcattgcaaatatagtctattttcaatgttatagtgaaagcctgttgatatgatgcaaaataactgaagcatgatattgatgggcttttttgttattttaatttttaataagagaagaacttttgaaatttttgccagttattttaagtttggctttgataacaaatgcctcttacgctaatccttttgaccccaaaccagcttctgggcaggttgaaattccaaatattggaagtggaatagggctgctcgaccaacagaaagaaaaatttattggcgaaaaagttttccgtgaagttcataagcaaatgtcggttatacaggatgtatggctagaagatcagttttttcaagttttctctaatattttaagtgaaactcagctggggcagccgatcgctctggttgtaattaaagacccacaaattaacgcatttgctgttccaggtgggttatttgcattaaatactggccttatctcatcggcacgaaatattgatgaaattgcgggggtaatggcccatgaaattgctcacgtttcgcaaaggcactttagtcgttcggaagaagcttttaaaggacaaactcttttaagtttggctggtttattagcaggggtggctttagctgcccaggctggtggagacgctggtgctgctgttatgttgggtacacaagcagcacttcttgataaacagctcacttatagtcgtaatcaagagcgtgaagcggatcgaattggtatgcaatatatgtatgccgctggttataacccgcaaagcatggcggattattttgaaacgatgcatagagcgacgagccgtgtaagttttttaccagatttttggctgactcaccctcttacatctgaacgtatgagtgaggctcgcttgagagcaaaccagatgcctaaagttaaaagtcgaatatatgatgtcgattttgaaattttaaaatggtataccatggtggttgctggagaagctactgaaaatcagttgcaaagtctggcatcgcaaaaaaatctggcaggcttattggctttgtcggctttctatcttaaacaaggtgattatactcaagcccaagcaacgttggagcaggcgaaatcaagcggtaagccattagttgccttaattcaaacagatatttatttaggccagaataaacttgatcaggcctataattcaattgctcccttgcaaatgacaatgcctgaaaataaagcttttagctacaaattggctgaggttttattacgtcaaggtaaatatgctcaagtgcaaactttggtgcagcgttttattaataaaaatgcccgagatattcaaggttggcaattattacaacaagcagccaatttggataaaaattcgccattaagagctgtgaatgtattgcgatatcgtgctgaagcacagtactggtctggtagtgaagaggatgcaattaaatcgatgttgcatgcacaacgtcttgcaaaaggtaatcaggccatgtcagccagaatagatagtcgattaaagcaaatgcaagatgagcgacgaatgaaaatctaaggtctaagataactttggaattttcacaggcataaatatacttaaacttataagaaagtttaatttaaggatatataagaagagaggggattaagctaatttagctttaatttttgctgaaacttgagcaggatcggcacgcccggctatgatcggacgtagagaattcatcaccttacccatatctttcatgctagttgcttcttgagcagcaatcgtttgctcaatgagagaatcaagctcttcctcagtcatagcttctggtagaaactgagataaaacctcagcttcggcttgttctttactagctaaatcatcacgaccagcaccttcgaaggctttgatcgattctttacgttgtttaatttgcttttcaatgaccgcaagaacctgagcgtcgtcaagctctatgcgctcatcgacttcgatttgcttaattgctgcttgtagactacgcaaaaccgtcactgttgccatatctttggcacgcatagaagtttttaatgcatcagtaatttggttttttaaagtagtcataatgttagcagtcaatcacaaattaattagtaaaggcgagtagtacgtacagattcgcgagccaatttcttttggtagcgtttaactgcagcagcttttttgcgcttacgttcttgagttggtttttcgtagaattcgcgtttacgaacgtcagctaaaacaccagctttttcgcatgaacgtttgaaacgacggatagctacgtcaactggttcgccttctttcaacttaacttgtggcatgtaaaatcctctagattatggataagatcaggcacaccattgcgccagatcacaagtgaaggtcagtattttactcatttacaactcatatcacaagtctataatagcgattgcaatattttgactcatataaaaggcagttttgatgattgttttaggcttggaaacttcttgtgatgaaacagggttggcactttatgatagcgaactcggcttacggggacaggttctttatagccagataaaacttcatgccgaatatggtggtgtggttccagagttagcttctcgtgaccatgttcgtaagcttattcctttaatgaatcagctgcttgaacaaagtggtgttaagaaacaggaaattgatgcagtcgcatatacgcgtggcccgggtttaatgggagcgttaatgaccggagccttgtttggaagaactttagcattttcacttaataaaccggcaattggtgttcaccacatggaaggccatatgttggctcctttgctttcaagccaaccgcctgagtttccatttgttgcattgcttgtttcaggtggtcatacacaattgatggcagctcatggtattggtcaatatgagctattaggtgagtcaattgatgatgcggcaggtgaagctttcgacaaagtcgcaaaaatgatgaatctgccatatccgggtggaccaaatattgctaagttggcgttatctggtgatcctttagcatttgaatttccacgcccaatgcttcatcagggcttagacttttcttttagtggtttaaagacggcagtttctgttcagttgaaaaaattgaacggcgaaaaccgtgatgctgatattgctgcttcattccaagaagccattgtagataccttagtaaaaaaatctgtaaaagctttaaagcagactgggcttaagcgtttagtaattgctggtggggtaagtgcaaatttacgattacgtgaacagttggaaacttcattggcgaaaattaaagctcaggtttactatgcagaacctgctttatgtactgataatggtgcaatgattgcatttgcaggttatcagcgtttaaaagcaggtcagcatgatggtttagctgtcactactacaccacgttggccaatgactgaacttactattcctgagtaagattattcatcttcaaaggcttgtggattttcgatatcaatatattcgatgtatccacggccttgaacttcattgccaaaataatgaccagtaaatatatagctacttgcataacctcgcccatgaccatagcggaatgggcagtcaatttctgcctgaatgtttaagataatttgctttgcatcatttcgagcgatccatgaaaaatattttggaagtcgcattttttgcccactaggtgaaacgaagtcatcaacttgatgcgaaataatatcaaagcttacatctgtgtaaatttcagctggctggtccagatgtctaatatgcagggtgtatgcagctgtttgtcctgcaatatcggctttggtaagaagaagttgagtggcctcgtttaaattgataatttgataagtaaaaaaatcaagtggcagtttatatgcatcaggaataagtttatttgtaatggagtgaggacccactgctcgtgcatattcgtaagtacaaagtccttgggtttcaatgcgttttgcttgatagtttaaaaaacctttaaactttgccaataaactaaaatgatcatagattggtgtttttataaaccatgaaacatgtgaagtgatatcgatatcaaagtcgaaatcaaacccatcataatgtccattaatatggatgtgtggaaattttccttgaattgaaatttcctgacctagttctattaaggttccatctttattaatttttgtatcttcagaaatgatataggccttcagtaaagcttgttccagagcagctgtgcttgaaaagaaagtagcggtttttctcgggtttccagtgatgatgtcatcatggtcaaaagcaagtgcaccgggcgtaccgattaaaatcataatatttaagtaacgatgcggctctggtaaaagtgggaaaaagataccgtagtgtgtccagctataatatttttcgtcaattcgtggacggatgatatgagtttgagtaaaaggaagagttgaatatttttttgcttggtctaaaacgccttgtgcaagtaataaacttttagcaagcgctttacttgttgtagaaatttttggcaattgttttttcatatataaacctaaagaagggctatctttgttttaggttatgaaaaacaactgccaaagctaagcggtttataggccaaagctaaggctttgcgggacattttatttaattgttagacaaatcttttaaggcgtttaaaccaatccaatgcttagaaaactgataagcagctcgaccagagcgctgaccccgcatttggcaccaacgcaagctttcagcacgaacttcatcattaaaaggcatgtttgctttatctagataatgctctacgatttctaaatataagttttgatccattggataaaaagataaccacaaaccaaaacggtcagacaaagagatcttttcttcaatcgcttcttgcggatgaagctcagtatattgaggcacatctactttggttacaggggtgttttcatgcatgaactcaggtaataagtgacgacggttactggtcgcataaataataaaatttgttgaacccgactgtaaggaaccatctaatacgctttttaaactacggtaattttcatcttcagcattaaatgctagatcatcacaatagacgatgtatttttcaggtcggttttgaataattttttgaatttttggtaagtctgctaaatcatcacgttcaatttcaatcaaacgtaatccttgaggtgcatactccgtgagtaaagcacgaacaatagaggatttacccgtaccacgtgaacccgttaaaagtacatcatttgccggtaagccatttaaaaactgcaaagtattttgaatgatcttttctttttgtctttcgatgccttttaagtcatcaagataaatatttttaggtgtataaatagctttaagctgctggttttcccatctaaaagcaggggcagtaaaatcggtctcttgtttcggttcaggtaagacctgctgtaactgatttaatacaagtgataaggtttgaactaaattgtcgggtaaatcaatggtagccatggttaatcaatcatgttaaacagtaatttactaggatactaacaccgaaatttgcaagctgacaaaaaagatacgactcatgcagtttatcggttttgcaattgattgaaatgttcagaccgcgcatagtgttgtcatgtctattcagtaaaatcatctgtgaagatgaggacgaaatatgtttgaaaaaatacgaagtgatatgaatccgcatcaggcttaccgtatcaaaaaattacaacgtcagttagacatggctgaatcttatgaagagtggaagtcttttgcattaaaactggatgaagaaactggggcgcaagagtggaagtttgataatagttcgccttacttcgatgccgagctcatttcttatcgttacactttactgaaaagataccgtcagcagcaccgcactttagatttgatttatcttttaaaagaagggttgacctacgatattgcaaatattggtcaccctatgttgtttgctgccacacatgtaggcacaaaaaaactaattgaagattatattgaagaagtcagccaaagcttggcttatattgcatctagtgaatgtattacattccaaagaaaagaaaaaatcgaattttttgaaaactgtgaaaaagcatatggacagcctgctcttatgttctcgggcggagcaaccttaggtctttttcataccggtgtatgtaaggctttaattgaacaagatttaatgcctaaagtcctgtctggttcaagtgcgggcgccattatgacgggtatgttgggaatttctgccagtgaagatatccaaaacttgctaaatggtgagcaattttttagtgatgcttttcactttagaaaacttcgtgaacttataaaagggaatggagggattgccgatgttcactatttaaaaaaattcttaattgaaaatttaggtgatcttacttttgaagaagcattcaaaaaatcaggtttgaatattaatgtcgctgttgcgccgtacgatgcaactgaaaaccctcgaattatgaatgcgattatgactccaaatgttttggtttggagtgcggtattggcttcttgtgctgtgccagttttatttccacctgtgcgtttaaccagtaagcgttatgatggtgaacatactccatatatggcaaatactaaatgggtggacggcagtgtacgtagcgatttcccacaagaaagaatggcaagactttataatttaaactacaccattgccagtcaagtgaatccgcatgttgtaccgtttatgcaagatgatgcgcgccgtttccgtaaagacgttttaagttggcctgaacgaattttaagacgccaaggtaaagtactctcaatggggctgatggactttacacgtcaaagattaggcgcaatttcacccgtaagaagactgctcgatcatggatatggcgtagtagggcagcgctattatggtgatgttaatattattgctaaatatagcttaaaacattatgcctatacgctacaaaacccacgcccacatttgtttaaacgtttacagcgagaaggtgagcgcgcgacttggccgaaaatctcttctattgaaacgcacgcgcgtattggtaaaacgattcagcactgtttagaagttttacgttttgaagaaaagaaacaacagccagaatcttattatgctgaagcatgattttgcttctcatatagaaaacctaaaatgtgcgacaaagcctagaagtgaagctttaggacggcatctatggacatgtactataggtgctgattcctactggttaaaatttcatttgccaaatgtacatgctcaaagtgagcaagattttttgcatgaattgcaattttatgtagatattacatataaaaaagcgaattggcttttgccatttaaaattatcgagggcagtactgtttctcaacaaccacaatttcaaggaagagtattagttttaccggatacagattgttggtttgatgatttagatcaaaagcaaaatttaaaaaatataaatgagaaaatctatctgacacttgttaagttagcagagcttcatgagttaggatggattcatggtgatattaaaaaagaacattttcgaaagtttaagcaagagctttatttaattgactttgaaaaaacacggcttgtttcaagccctgatccaataactgatgctacaccacggtatatggcgccagagctatttcatggtgccaataaaaccgttcaaagtgatttatatgcattgggaatcgtattgtatgaatggttaacacaaactcgtttacaagcaaatagttaccatgagtgggcggtattgcactgtcaaaaattaaatgtggaattaccaagttcgttccaaattttcttgccactactttcaggcttgttacaaaaacagcagcaaaaccggttttcaaatgtacatgaagcgataaattgcttaaaagcgctctcaacctgataaaaatcattgatctagtaactgtatacaaattactcggtcagttttttttgaaaaaaaacacttgtcactgttagatcttatcgctaatatacacagccatcgggggcgtggcgaaattggtagacgcactggatttaggttccagcgccgcaaggtgtaagagttcgagtctcttcgcccccaccactttaagttaagtcttaaagtttgatatagatgttaagacatctagatctcggaagaggattggtgtaatggtagcatgacggtctccaaaaccgttcgtcaaggttcgagtccttgatcctctgccacatttattttaaataaatgtcccagatgggggcgtggcgaaattggtagacgcactggatttaggttccagcgccgcaaggtgtaagagttcgagtctcttcgcccccaccatagaaagaagcaagacgatgatcttgctttttttatgattaaatctgaatgatttaattgtctatagaggattggtgtaatggtagcatgacggtctccaaaaccgttcgtcaaggttcgagtccttgatcctctgccaagattctaaaaaagctccttttgtggagcttttttatttcaatatcagtacctacctttaattgttagctattcgcttctcaagcatttccataaaggtttttaaaatattattgtgatttttacccttatgagtaattaagcatataggggtgctgtagtgcattttgtcttttaaaacaggctgcataacaccgtcttcaacccatttttttgcatagtggtcgggtaaaaaacctaaaaattttccggttaaaatgagaaaggcaataccttcgcggtcacttgcggtcgctttacaatctaaaagctgatgcaacttggccgcttccgaggtaatggcataattaggaagaatagcttgccatttttttaattcatttaaatgaatgttgctacattggttaaataaaggatgatttttgccacaatataaaaatgaactttcactatataaatcaaaatagtctagaccggacaaaggtgtaacaagggggataacacctgcatgtaaacggttatcgagtacgcggcattcaatatctgacaaagtactcatactaatattaataataacttcggcatgttcttcggcaagttgagtcaaggtgttggtgatatagcctctaggcatagttacaaggttgttaataatgccgatattaaactcacccttaaggcggttatgcatttggttgactttagaacggaagtcttcaatcgctgctgtgagcacttcaatatattctaaaatttcccgcccttcgtcggtcagggcaaatccggcacggcctcgctgacatagccgaatgcccaaacgattttctaaatcactcatatgcaaactaatggcagagcggctaatacctaaaatactttcggcagatgtaaagctgtgacagtcgcaaaccgttttaaatatttttagaagttttatatcaaaatcagtgacttgatttaattttttaggtttcatttagttttgtttttttaaatctaaactcaagataatttgaatttatcaaacttatctcgctatgtacactcaaaccataatttgaaaataaacaggaatggttatgtttgatacggataaatttagcgactcagaacatactttggatgcggttcaaactaataataatatgcacataaattatcaggtgcactggatgcctttttcagcaaaccgaaactttgctaaagacccacgtatgattgtgggtgccaaagggtcttatctgattgatgattctggccgtgaaatattcgattcactttcaggcttatggacgtgtggtgcaggtcataccttgcccgaaattcaacaagcggtgagcgctcagttaggtcagctcgattactcaccggctttccaatttggtcatccgctttcttttaagctggcagataaaattgttcagcatatgcctgaaaaactacaacacgttttctttaccaactcaggttcggagtcggcagatacgtctataaaaatggcacgcgcctattggcgcattaaaggcaaaccaagtaaaaccaaattgattggtcgtgcccgtggctaccatggcgtaaacgttgcgggaacaagtctaggtgggattggcggcaaccgtaaaatgtttggtcagcttatggatgttgaccatttaccacatactttacagccgaatttaacttttaccaaaggctgtgcagaaacaggcggggtagaacttgccaatgaaatgcttaaattaattgagctacatgatgcttcaaatattgcagccgtcattgtggagcctatttccggttcggcaggttgtattgtaccgccaacaggctatttacaacgtttacgagagatctgtgatcagcatgacatcttgttaatttttgatgaggtgattacaggttttggtcgtttaggaacatggactgcggcggaatatttcggagttacgccagatattttgaactttgcgaaacaagtcaccaacggtgccattcctttaggtggtgtggtggcaagccatgaaatttactctgcgtttatgcagcaagacttaccagaacacgccattgaatttacccacggctatacctattcggcacatccggttgcttgtgctgccgctttagctgcgcttgaaattttagagaagaaaaacctgctggctcaatcggcagcgttggcaccaagttttgaaaaaatgctgcatggtttaaaaggcgcaccgcacattttagacattcgcaactgtggcttgattggtgctttgcagttagctccgcgtgatggtgatgccaccatccgaggctttgagcttggtatgaaactctggaaagaaggtttctatgttcgctttggtggcgacacgcttcagttcggtccaatgtttaacagtacagaagcagatattgaccgcttaatgaatgctgtgggcgatgcactttatcaagtgaattaaagtttattaggcattttatcggggtctgtaatgtcaacagacctatcttcaaaatctaaatgaaaaatacagtttgatctgaaaactaattgtagtaaggagtaacaacaatgacaaatggcctagaagattttagctatgacgaagtttcaactgaaaatagtacgcagagtgaacaagccaaaaaagtgctagggcatttcattcaaggaagaattgtatctaaaacggcaagaaaacagccagtttacaatcctgcgacgggtgaaattagtaaagaagtcgaaattgcagatgcacaaacggtaaatgaagcagttcaggcagccgagcaagcatttcctgcatggcgagatacaccagtcattaaacgtgcacgtgtcatgtttaagttcaaacaattattagagcaaaatgccgaaaagatttgcgctttgattgggcaagagcacggtaaaatttctcatgatgctcaaggcgaactgcaacgtggtattgaaaatgttgaatacgcttgcggtgcaccagagcttttaaaaggggagttttcaaaaaatgtcggtccagatatcgactcatggagtgagttccagccgttaggtgttgtggctggaattacaccgtttaacttcccggccatggtggcgttatggatgttcccaatggcactggtttgcggtaactgctttattttaaaaccttctgaaaaagcaccttcagtggttttattccttgctgaacttttaaaaaaggcaggtttacctgacggcgtgtttaacgtggtgaatggtgacaaagaagcggtagatgctttattgcatcatcctcgcattcaggcagtcagctttgtgggttcaacaccaattgctgaatatatttaccgtaccgcgacttcaacgggtaaacgttgccaagcattaggcggtgcaaaaaatcatgcgatcattatggctgatgccgatattgataacgtagtgacttcattattaggtgcagcttttggctcttctggtgaacgttgtatggcactttcggttgcagttgccattggagatgaagttgccgatgttgtgattgataagctgactcaagaaatgaaaaaattgaagttcggccactatgcagatgcaagcaacgactttgggccacttattacccaagcgcataaagacaaagtgcaggcttatattcaaagcgcagagcagcaaggcgcaaaaattgtggtcgatggccgcgatgcaaaaccggcaggctatgaaaaaggtttctttgttgggccaactttaattgatcaagtcacaccaaacatgaccagttaccagcaagagatttttggtcctgtgttgcaagttatgcgtgtaaataccatgcaagaagcgatgcaactcattaatgaccatgaatatggtaacggtacttgtatctatacccgtgacggtgaggcagcacgctattttagcagtcatattcaagtcggtatggtgggtattaatgtgcctttaccagtacctgtggcttatcatagctttggtggctggaagcgttcactgtttggtgatttacatgcgtatggcccagatggtgtccgtttttacacacgccgtaaaaccattacacagcgttggccatctgctcaagtccgtgaagcaaaacaattttcaatgccaactttaaattaatttttattattagggaaaacagccgttttcccttttttcatgactgtaggattttgaaatgtaatagatcgttttgatggatatatttttaaggaatgaaatatgaataatgatagaacaaaaaaattaggcgaaggactttcaaatcgccatatcacaatgattagtattggcggtgttattggtgctggtttatttgtcggttcatcttctgcaattgccaaagcaggcccagcggtgattcttgcgtacctgattaccagcattatggtttttctagtgatgcgcatgttaggtgaaatggccgttttagagccggacactggttcattttctacctatgcccgtaaagcaattggcccgtgggcaggctttaccattggctggttgtattggtggttttgggtacttgcgattccggtagaagccattgcaggtgctgaaattttacattcgtggtttccgagcgtttcagtttctatctatgcgttttgctttattgtgttcttaagcttagccaacttttttagtaccaaaagttttggtgagtttgagttctggttttctttggtcaaagtggttgccattattggtttcattattattggtattttggcaatttcaggtatttggcctttagctaaaaatgtcagtggtgttgctaatttatacaacaacgctggttttatgccgcacgggatgggaggcattttagctgccattttaattacggcattttcattctttggtgtggaaattgtctcgattgccgcagcagagtcatctaaccctaaacagaaaattagacgtgccaccaatttggtgttgtaccgtattattctttttttcgtggtctcaatgtttattgcggtttcacttgtcgattggcgttcaccggacttacaaaagtacgggacattccaatacgttttaatgagcttaaacgtaccgggcactaaacttattattgatacggtcgtgtttatcgccgtagcgagctgtatgaatgcggcaatttatacgtcttctcgtatgttatttcgtttgggaacacgcaatgaagcaccgcaggcagtcactaaagtgaactatgctggtgtaccagcaattgcggtgttttcctcaacttttattggtttagtgtgctgtgtcataaactatgtatttcctggaaaagtctttggcttattgctctcaagcacagggtcaattgctttactcgtgtacttggttattgcgttttcacaactacgtttaagacataagctagaagcagttggagcggaaattccatttaaaatgtggttattcccatggctgacttggtttgtgattatcattattttaagtgtattggcttatatgttcttctcaccagcctatagttatgaaacgactctatctttaggtgtaaccttaggtgtggtggtttgcggtttgtttgtgacccgaaagcgtaaagcaacccgttcggttgcgatcaatcagagtaatttataaaatattaaattaatttttaatgatataaataaaaagctccttaataaaaaggagctttttacttttttaattctaattattttattttaattgtaggtgggtttttataataatataaagagttaaaagctaactaagcaaagacgtttaaatcgcttgccagttttctttaacttcttctgagtttttatttaaaatgacttgatcttcttttacctccccaatccatgaagtagggataagatgatgttgatcattttcatctttggtgagttttaactgattttcaccttcaagatgatcgacagttcctactttggtgccacaagaagcaataacgtctgcatgttttttaatatcattaatatttaaagtattcatctttgacctcttctttggaaatagaaaaacggtagaaactaaattactggataaaacagcagaaatccttaatttttaataaaccttacatgattattttataatttcacttaagcgatatatttaggtaacaatgaaataaaaagaaatattcattgaataaagttatagaaaatatctttttattacattttatatctttaattaaacagaattatttcgatatgtttaagtgaatacttttgaataattatttgtaatgaatattaaaatatctataaatatgacaatcttgagtatgttgagtgaatttgaacatgctcaggccgaaaacaaaagtcagctccgccaagatttactctaccaattggtaagtttatctaaaagtttgccttatccagcttcaggtcatacctatcagcgatggcaattgtttgctcaaattgcagggtatgatttaagtctcgctaaattatttgagtcacatcatgatgctttaagtattctaaatgaattgggctatcaagacgaaatcgatgaccaaacttgggcggtatgggcagcagatggcggaccggcacctgtacaggtccagaacaatcactgtaatggcataaaaacctggtgctcaggtgcagagtttattcaaaaagccctaatgagttataaggacaaagaaggccaagcacagctttgtatcgttgatttggctcatccctctgttcatgttgacttgagccactggcaagcagtcggtatgcagggaacccaaacagctcaagtgcattttgacaatactcctgttattcctatcggactgccaaattgctatttggaacgtccgggtttttggcatggtgctgctggtgttgcggcttgttggtatggtgccgcggtacgcttggttagcttcttacataaaagttgcacccttaacccaaacgcatttaaaaaaatgtatttaggggagttggctcaacagctctctgtaaccaaacagtattttcaatatattgccaagctcattgatgatgagcctgcgctcagccatgagcgtgaaatccgtatattacgtgcccaaacagaacaatgctgccagagtgttattcaactcgttggtaaagctttgggcgcgcgtccttattgtgaagagcctacattttcacagctcatcgctgatttaccagtatttatccgacagagccatgcggcttttgattatgagtctattgctgagctctgtttaccggagaaaagcttatgggaactttgaagcatcccttagtagaggaccgtatgatttcaggtgaaggtacacccgaattcatgtggcttgaggcatttaaaaagaatcctttagatcggctgaatttaaagttgtttcagtctaaaagagtggtgattgttgctccgcatcctgatgacgaagtgctgggttgtggcggcttaatgcagcagctagttgagcaaaactgtcatattgtcattttggcagtcagtaatggaacacaaagccatcctcattcagtgaaatatactcctgaccaattgaacgatttacgtccgcaagaaacactggctgctttaaacactttaggtatttcagctttttctgaacggattggtttaaatctaatggatggtcaaattcatttacagactgatcaattgaatcaggcgcttagccaaatagttcagcccgaagatattttaatttgtagctatgcacttgatggccatccagatcatgaggctgtcgggaaaacagtacaagcttttgctgaagctcgggacttactatgtttgcatgtattgatttgggcatggcattgggcagagccttttgacacacgaattaactggtccaaagcaaaagcttatgccttaactgaaaaccagttaattaaaaaacatcaggcggttatgcaatttaaaacacaacttgaagccgatgagagcacaggaaattccgccgttttatcctcaagtgcgattagccgtcttttaatgccttatgaggtatatctgagtgattcattctcgtgtgtattttgaagagttgtatcgtagtaataatgacccatggggctatgactatcactggtatgaagcccgtaaaagacaaatctgccttgcattattaacgcgaccacactacgaaagagttttagaaattggttgttcaaatgggcatttaagtgtttatctggctcagcgcgctgctcatctgttatgtattgatgtgtcgaagcaagccgttcagctcgcatcccaacggttagaagcatttgaacatgtgactgttgaaaatagaaaaatacctgaagatttttatgaacaaaaatttgacctgattgtaattagcgaagtggcgtactacctcacattcgatgagttaggtgagtttattgaacagttaaagcaggccttaaacccggaaggggaaattttgtgttgccattggcgacatgatattcaggattttgaattgaatgcccaaaaagtccatcaaagctttcaacaatcttttccatttcatcactatttaagtctgaacgatccggactttatggtagatgtttggacggttaatccttcatcaatagctcagcgagaacaattacgatgaaaataggtgttgtagttccagcgcataatgaagagcaacatttgcccgcctgtttgcaatcaattcaggaggcgattgaaaaagtaccggatgaacaagtcgaggttatggttgtacttgatagttgtacggatcagtcgcgctcaattgtacagcgctacggagtaagctggattgaatgcaattatgcatgtgtcggaaaggcacgggacttaggtatccgccaacttattcaaaacggcgcaacttggctggcttgtacagatgctgatagtgtggtcagccctgactggttacgctgccagattttgcatcaacctacagatgcaatttgtggcattgtgactttagatgaccttagccgtttatcggttatgaaacaaaaaaatatttatcgcattatcaggattgtatggatcatcaccatattcatggcgcaaatttaagttttagtgctgctgcttatatgcaagtaggcggttttgaacctgttccttgccatgaagatgtttcgctcattcaaaaactgataaggcagtgctgtaatattacatggagcaatttagttcgggtaactaccagtagtcgactcgaaggaagagcgccagaaggcttatcaaaatttttagaaaatctttaattaaacttattttcttaagattattttaataattgaaatatattctaaactcagatcctctgttatacatagtgttttagtgttcattgagctatacctttttgccacatcacccgatgtggttttttttcattatgaccatacaaacatctaggccaacgaaaagaccttctcaacaatagtgctgtatatctgacacgatgacacaaaaaatcacaaaagctaaaactcacggttttcataaattgtttagatagctatagataaaataacgaggagaatattcatgaaaaaaatattatttaccacactcactggacttgttttattaactagtagtacagcatttgcaagaacagattccgctttacttaatcaagcagcaaaaaatgtagtcactgtttcaaaagctaaaactttagctgatgaaacaggggtaaccttaactggtactatcgttaagcatattgctggcgaccattatgaatttaaagacaaaacaggttcaatcatgattgatgtcgatgatgatttggcaaatggttggcagttaaaggttggagataaagtgcgtattgtaggtgaggttgatacccaccgcgttaaaccgactgaaattgaagtgttacaaattgaacgtgttaaataatttttcattttaaataaaaagctcgaactagattcgggcttttttattgaaataagcaagcttataaattttttataataatgaaatataaagtattttaaataaaggtatgttaagttgaaaattccattaataatgaaattttatatttcacggaagtcttatgaacgttcgcctgtgttatgccagccaacgaaatgaaaaaaatgaagatttgctacaagatttacgtgatattctgacagaagctcgtgatttcaacgatttaaacgggatttgtggggtgctttattatgccgataatgcattttttcaatgtctagaaggcgaacaagaggtcgttgaaagattatttgaaaaaattcaaaaagatcaaaggcattataatattaaatggttatgcacatactccattgatgaacactcttttcagcgttggtcaatgaaatacgtgcagcgtaatacaaatattgaaactttctttcttaacatgggagaaaatacctttaacccgcttttgctgaaccagcaaaacctcaaatttttcttaaatgaactcttaattgcagagcaaactaagatgaatacggttaaaaaagttggaatggtgaatcggggagtaaacccgttctagctattagatgcgataccgatatggatgtgtttgagttcaggtacgatttgtgtcatgactaaatagacaattactgaaatcgacagcatccatatcacttctaaactttgactaatcacaaacattgcccagtaaaaaaagctaaaaagggcaatacacagtccgcttcctttgtagtaccaagtaataaatattccaaagagcgctgaagaaatgatgagatttagtgtctgattcattcctagatagttaaaaagaataattagtaagcataaagctaacattgatagtaaatatacaaatatattttttgcaataaacattctttatatcctatctgaagatttaaaaagtaatctttcctctgtttccagaggaaagatagtacatattcattttttgagattctttttctattattgagactttttatattaataaagatgactttatcattttctccagatctctttattaatattcagctttctatttaatagtaaagagtgcttatatgtactgaaattaattataggaaaaacaatcaattatgttgtaagctttagcttacataattgtgagacattgcctacatttgtataaaaaataacctaattttacaaagttatatgaataaaactttatattttacatatgtttatttaaaattattgttggggtggtctttacataaataacaaaaagtaacatcggattttcaatcattatttttaaataaaacttgatgaattaaaaatattattattaaaaatttagttaatatgagtttttataatttgtataatgaaaagtaataatttaaagatataaatttaaaatatgtttgttaaaaatagatttccttatctattttgattaggtttgggtgatcaaaatctaggcaacatgggccaccagactgaggctagtaatataatagccattattttgttaaaaatatttatatgttttggttttgaaagaagccgagtacttagtctgcctactaaggcccataggtagagacaaggaaatgctataagtaaaaaaatgcaggataaaattgagacatttatcaagatatcttgtccctgttttgtatagacgctaataactgcaaaagccatcatccatgttttaggattaatcgcttgcattaaaaaagcagctttaaaaccaataggagggtattgttcatttttttctaaagagataacaggattgtagttatatagtttccaagctagaacggtaagccagattaaaccactccatgtcataattttttgaataacagggtaagcaagaatagtggagccaaggccaataccaaccactaatacaagtaaggctgctccaatacaagaacctaaaataacgggaagtgttttagaaattttataatgactacttaaacttaaaattataaagttggtcgggcctggagtaattgaggcaacaattgcaaataatgaaaatgcagtgaggttttccatcttgtctaccttagttaattgggagagacaagatgaaataattaagatttttaatcttgaagatttgtgcagatttttctgtaagcggctggtgttagttcataacagcgtttaaaccaacgacttaaatgactttggtctgaaaaacataaatcagaagcaacttgtgctggagaaatacttctagcgagtaaatcacgtgctcgagtaagcctaagttgaataagatattgatgaggagctaaatgaaaagtggatttaaaaatacggtgaatatggtaacggtctagtcccaccatacgtgatatatcttttaacccaatatcttcaaataaatgatcatgcagaatatctcggatttgatgggcgatttggggtacatgaatacacgaagattgagaagctttttttaaccatttaccttgggcaatatattgaataagcacatctagactattgtctttcacaatattcatttctttatagtgtaagtgtcgaaatgcttgtgaagtaatgattgcgagttgatcatcggattttaatggcgcatcaatcactagttcgtaatgatcggggctgttgtgaaacaaaccttgaaggcgttgctttaaccattctggatgtagataaagcatttggtaggtaaaaccatcagatgcaggcgcatgtccatcatgaatttcttctggctcaagcataaaaacttgcccagcatgactattgatttgctttttacggcaatgaaattgttgaataccagattcagttacaccaattaaataacttgaatgccaatggggatcataagcatggccagtaaaatgagcacggattgtttcgatacccgtattggtatcttttgaaatatccacccagttactactcataagcactgacctataaacttttaattttagcccctgaaacagtataaaagagataaaattagttctagaagatttgtgcaaaaactttaaaaatttagtgtgtattaaaaccagcctaaggtttaacaggctggtttttcattaacgtttgaattgattaatctgaacgcgtagccagccaattactcatttcaggccaaacagaggtcggagcttgactaccggacactacgcccatatggccgccgggcacagttttgaacgttttatcttggctactaattaaatccataagaggcttaacagcatcggcggtcacaataatgtcggtatcgccacctacagccaacactgaacaatcaatatcttttaaataagctgtaagttccccaaatttgattacacctgttgagagttcattatcaatccagaaacgtaaaataatgtcgcgcataacgccacccggataggccagcatattgtcgataaatgaactagaggtagcgtggtcgacaataaattctcggttatccagatttttaagaagttgccaataggtttttaaattgccaatggggtccgttaatttaaaaccgagtgtgttttgccatccatggatatgaaacacttcacttggtacatgttggcgaatacgaaaaggcgtatgcttacggacccactgtgcaggtttagtcagacttccatagagcttacccatataacctgctttatgtgtgtcgatcggggaagcaagaattatcagattcttaatatctttatctttaaataatgcggtatagcaaagtgaaagggcgccacctaaactccagccatgtaatgaaagctgttgttgtccactatgtatacggacttgctttaacatttcaggcataaagacttttacataggtgccaaaattgtatttggcttgattgcgagtaggtacaccccagtctattaaataaacctcgaagccttgatctaaaaaatagcgtatcaggctgcgggtaggaaacaaatcgtaaataagcatgttcacagctaaaggcggaacaatcactaacggcacacggtgtttggctgaagcttctgtctcatttctataatggcgaaggcttataatttcatgcttataaattacatcaaaaggtgtttttcctgacagggcaatttccgaccctctaaaaaacagatctgatgcattggagagcatgtgaggtattttctgaccagcacgctttttaagagatgttttaatcgactgtacctgtggaacattctgtcgaactttaagcaataaactcattgaatataaaacctataaagatgttgcccagagcaaataacgagctggtcttttgcggatattaaagggaataaaagatgagttcagtgacctaaaagacaggattttctgtttaagagatcaaagtgaagttatactaaattaatgatttctttacataagattttgaaatgattgataaattaaattatagggcatgattttgtataaaatatttaaaaatttaagctattcttaagaatagtaaaaatttattggtagggtaattttgtaaagtttatttgtgttttttttacatattaaaaaataaaatataattattttacaatccgttaggaatgtaatcagaaagtagtatatatggaatttgtttttaatggtttttatacactaatttcggcggtcatcgttctattgttgggtcgctttcttgtcaatcggattgattttttaaaacgttataatatccctgaaccagtagcaggtggtttggtcgctgcggtagtttctttacttgtccacactttttggggatacagtattgtttttagcagtgaattacaaaccagctttatgctcgtgttctttgcttcaattggtttaagtgccaattttatgaagcttaaagagggtggtactgctttagtcatcttcttaatttgtgtagcctcatttattgttgttcaaaatgctgtcggtatgagccttgcaaccttattgggtctagacccacttattggtttgattgcaggttcaattacattaaccggtggtcatggtacagcaggtgcgtggggtgaaattttagaaagccagcatggtattcagggtgctttagcgttaggtatggcaagtgctacgtttggcttgattattggtggtgtcattggtggtcctttagccaaattgctcattaatcgttatagccttgctcaagcaaaaaccaatgctgagattcagcagcgtgacacgcatgttgaacaaaattcagatgatcttgcaccgtttgaaaacccgcatcaagttcgtttaattactgccgacaatgcaattactacgcttggtatgtttgcagcatgtttagcatttgctgaatttatgactggcttcagtaagggaacttggtttgagttaccaactttcgtttgggcacttggtggcggtgtaatcttaagaaatattttagaaagcgtgttgaaggttgatatttttgaccgcgcgattgacgtttttggtaatgcgtctttatctctttatttagcaatggcattgctttcattaaagctttggcaacttgctgacttagcaggtccacttgtggttattttaggtgctcaaacactgactatggctttatatgcagcatttgtgactttccgtgtaatggggaaaaattacgatgcggcagtattggcagcaggtcactgtggtttcggtatgggggctacaccaaccgccgttgcaaatatgcaggcgattaccaatatgtatggcccatcgcataaagcattcttaattgttccgctttgtggtgcattctttgtcgacttgattaatgcaactgtgattcagcttatgttgaaatttattgcttaattaaaaaaagcccgtaagggcttttttatggggcattttatagccaacaacttaaaccgttaaatctgctgcacttagcatttcttggcccacaatcattttggcaaattgattggcaattcttcctgaacggttgccttgctgagttgcatattgaatagcttttaactgaatcgtttcccaagtttcgcgttgctgccatttgtattcatttagccagtattgaacagtttttaaatactcttgttggctaaagccatagaaattaatttgtaaaccaaatctgtccgctaaagaaatcttttgttcaatgctatcgcctgggcgtaattcgccattttccccgacatttagctctgtattatctttgttgtattcggccaccatatgctttcgatttgatgtcgcataaatgagtgtattgtctgaactagaggccagtgaaccatctaatacagtttttaaagttgcgtaacttgagtcgcctgcttcaaaggccaagtcatcacaaaagataataaaacgctcagtacggtcttgcagtaagttaataattttaggcaaatcttctaaatactttttctcaagttcaatcacccgaaggcctaagtggtgatattcatttaaacaggcttttacaatagacgacttgcctgtaccacgtgagcctgtcatgagtacattgtttgccaacaagccttttgcaaaggcttcagtatttagttttactttgttgagttggctgtcgatattgcaaagatgattaaaagaaatgagttgaggtttgcggatcgcgacgagcgaacctttattattttctctttcccatctaaaggcaatcgcctcatctaagacatctacagaaatttcttgggttttagaaattttttcgactgcttgagtaagcttttgaatttcaaaaataagatttgaaattgtctgacttaattccatgagctcaacctttaaaaatgcatgaaagagaaattgaacaattaaacataggatgatagtatcaccgtatgtttaagcttactagtaccaattttaatgattgagcaaattcaaaaaagatcactggtcgatgaagtgattcatgtcatacgtcagaatattaaaaatgacatttggaaagtagatgagaaaattccgactgaacctgagcttgttcaaggtttgggtgtgggccgaaacaccattcgtgaagcaattaaaattttagaatatttaggtgttttagaagtcaaacaggggctgggtacttttgtacgcacgaaaaatgacttttcaattgtgattaattcaattcatcattctgatttatatgaacacgtagaagtacgatgtttattagaaatcgaaattgctaaattagccgctagacattgcacgcctgaaaatatgcgcgatgttatagcgtgtttagaagatagagcagcaacaaatcaacaagatgttgctaacttcatgttaagtgataagaaactacatttggcaattgccaaggcgactcataataaagctttacaggcaacttatgagtatttcttaaactcaagctatcaatacaccttagagctagtgactaataaaaatttacctgacccaaaccagcaaatacatactgaacttgttcaagctattcaacacaagtctgagtcagaagccatgcgaattgcggagtctatgttggcgcccatattacgttcgctagattcaattaaagctgactttgtccaaaaccacctagatcaaatactatgagttttatgattgtttcgaacaactttgctgttccttactatttaaatgtgaggaaagaaaagggaatgacggcttattattgggcaactcaccaatctcagttagctctatttgactcttacgaattggcttatcgcttttactttccatctcgacatattttgattcgaagtgaaattaaagctttcgctcagtaatataataattgagtacaacaccaccatatattaaaaacataggagaactggctcctatgttttaaaatttatggttcactgactaatcttaatatattttttaacagtatacttcttaaaaattctttataactttcatctgtatttttgttcgaatgttgaactaaatatccattaagttgagtgattataataatcgctctttctttatattcttctgaagatattttattatgaatggggaggatgattttatagataagttcgagattatacttttgtatgattgacaaagcttcatatacatagggcaaatgatctgaaatagagaaaaactctttaaatgcatttgtgatgatcggttgctctatttcataaattatattagtgataatattcataaaccgaattaaaggtggttcatttgcattcaaattaattaaaatttcaatacgctgtatatagtcacaaattaatttattaagtaaagcttttaataaaatatctttattttgaaaataatgttgcaaagtacttaaactaatatttgattgagttgcaactcctctcatactaaatccggaataacctttagtaagaaaaactatttcagcatttcttaagatctgctttattctttcttgcccttttagagtggtaaaggacttctttatttgcatagtatcaaaggtatcaattttgatcattatccagcctgtaagtactatttaaaaaaagcattctaaaccatgaaattaaaaaaatataaataaaatatttaaattctattaaactaaaattaggtcgaacgacctatatttttttaatctaggtcattcgacctaattaatggttaaaaaatgggtcaaatgacttatttttatttctttaggtagggttaaaataggtcatgttacctattttaataaaaacaaataatacttgtttttgttgtgtgtataaataattgtatttgaataattatttaaaaagtatgatcgttaaaaagataatttctttttctaatttttagccattttaataaagtaggggtgggtatttaattgggagtttttgtaagattaaaaaaattgattttaaataactcaacatagtctttttgtaatatgtgtatacaagttaaataattgttattaaattgtgaagagaatcacacaatagtaaaaggtagtttgttttatatataaaacagattagccatattttatttgtcgagtttgattcattttgttctacaaatctaatcattatatatgtaggttatgaatatgaaaaacattcagaaatcacttcttgcagcattaatagttgctggttatgcggtaaatactcaagcagctgttactggacaggttgacgttaaattaaatatctcaacaggctgtactgtaggtggtagtcaaactgaaggaaatatgaacaagtttggtactttagattttggtaaaacttccggtacttggaacaacgtattaacagctgaagttgcttcagcagcaacaggtggcaatatttctgtgacttgtgatggaacagatcctgttgattttacagtcgcaattgacggtggtgaacgtacagaccgcactttaaaaaatactgcttctgctgatgtagttgcatataacgtttatcgcgatgctgcacgtacaaacctatatgttgtaaaccaaccacaacagttcactacagtaagtggccaagctactgctgtaccaattttcggtgcaattgctccaaacacaggtacaccaaaagcacaaggcgattataaagatactctattagtcactgtaaatttctaaatataaaaaagaaataattaattgagtagcaggtttgctcaaatatgagtagacctgttttaaatggggggaagatgatattcaatcgtggttcggcatttataatttcttattttttaatttctttattaaatgcgggtgaaattggagctaaattaactagtcaaattgaattattgccttcttgttctattaataataacgttgtagaaaataatgcagcaaatttaaattttggaactatagattttggtgaagctaccacaggttttaaaggggttttagaagccagtttagttaataatggtaattcaggttttaagattgagtgtgcaggtatttcgactgtaaaaataatatttggagcaggaaataatgatagtaatattccagcttcattttcacaaaattattatcatgctttaagtaatggtaaagattttattgcttataacttgctctatggtttaaataaacaagtcattaaagcaaatgaagcttttattcttaatgatatgaataataaaaagaatatcgatatttttggtcaagcagcccatgatggtagtcgtatatctaagggtgaatataaagatatagtaccaattacgattgagttttaagaaaaatgaaatacttatattttaaagcaatatttttgctatctgttagtcaatttatatatgcagcagatcctcagctcaattcaagttttaaagtacaagctaaaattgaaaatggctgttcaatagataatattgagcaaaacatggattttggtaaatactctgctttatcaaaaaataaagtaatgactaatgttattaatagcaaaggttcttggaatatccgttgtacggaaagtttacctgtaagtatttctatagatggtggtgaaaaccttcaaaataatacaagacgtatgaagaatagttcatcccctaattatttatcttacaaactgtataactctagcagtttatccaatgaatatattgtaggtaataaatatttattgcctgctacaacacctacaaaccgtctggcaaattttgaaatatatggtgtcgttgatttagaaaataataatgaaccccatgcggccggaatttataaagatactgtttcaataatgattacatggtgatttgtatgaacaattctgcatttattaaaaatggcattttaaaatcttttttatttgcaagtacattatcacttgttacacctgtgatggcacaagcaacttttctaatttggccgatttatccaaaaattgaagccaatgaaaaggcaactgcggtttggcttcaaaatacgggtaagaccgatgcaatggtgcaaattcgggtatttaaatggaatcaagatggcttaaaagataactatagtgagcaatcagaaattataccaagcccgcctgtagctaaaattaaagcaggcgagaagcatatgcttcgcttaaccaaaagcgccaatttgccggatggcaaagagcagtcatatcgtctgattgtagatgagttgccgatccgactttctgatggcaacgagcaagatgcttctaaagtaagtttccaaatgcgttactcaattccattgtttgcttatgggaaaggaattggcagtggattaaccgaagaaagtcaaaaaattaatgcaaaaaatgctttagcaaaaccggttttacagtggtcagttcgcaataatcaacaaggccagtctgagctatatcttaaaaataatggtcagaagtttgcgcgtctttcggcactgaaaacttcaaaaacaggtaatgatatctctttaggaaaggctgcttttggctatgttttatcaaatagcactgtaaagtttgctattgatcagtcaacggcacatgagttggcaaaaacatctaaaatttatggtgtggacagttctggtattaaacaagaattgatcgaaatcaccaaaatggaggatccatcatgatccttcggcataataatttatgcaaaagtattttgctgattttattgtcgggtggatgtttaaatattccaaatactgtgttcgcaggcgatttgcctccaccaccaagagacattaatgaaattaatcaactttttaaactgtatctcgatttggttgtgaaccaatattcggtccagcaagttgtgccagtgattgtgaaaaatgatgagtacttcatacaaaaaaagaagctgattgatgaattagaaattaagatccctcaagagttattaacaaacactgacacatctttatcgaatcaagatgttttgacattggggtttagtggtgacgcgagtgattggatatctttagataaattaaaagatgtaagttatgaatatcaatcttcgaaccaatactttaagctcaattttccgcccgcttggatgcccactcaagttttgggtaaagactcatggtataagccggaagtcgctcagtctggtatagggctgctcaataactatgatttttatacatatagaccctatcaaggcggttcaaccagtagtttatttactgagcagcgttttttctctccgttaggggtcattaaaaactctggtgtctatgtcaaaaaccattacaaaaatgaaggtaacgccgagtctgtagataatgatggctatcgtcgttatgacacatcttggcagtttgataaccaaaagaatgctacatcttttttactgggtgacattattaccggtagtaaaacgacatggggaagttctgttcgactaggcggttttcaggtacagagaaactattcaactcgaccggatttaattacctatccattgccacaatttattgggcaagctgcgttgccaagtacagtcgatttaattattaatgggcaaaagaccagctcaacagaagtacagtctgggccatttattttaaacaatgttccttttattaacggtaaaggggaagctgttgtggtcacgactgatgcagtcgggcgccaggtcacaacatcggtcccattttatatttctaatactttgctcaagcccggcttatttgattactcattgtctttagggaaaatccgtgaagactacggacttaagaatttttcttatggaaaatttgcaagtgcagccgatgcccgttatggggtaaatgactggctgactgtagaaggacgcaccgaactttcttcagatttacagttattgggtgctgggtctgtactcaagcttgcaaatttaggtgtgctgagtgcctcttttacccaaagtaaagccgacaaatctatgtctgaagatcgaacgaaagacttggaaggtaatcaatatacagttggatacagctataaccgtaatcggtttggttttagcattaaccataaccaacgtgatgatgaatataccgacctttcacggctgcaatatagcaatttaatttcagttaatagcaataaaagcctaacggccaatacttactttgccactaaaaactcaggaacttttggcgttggttatatcaataccaaggcgaatgacttcaaaaatcgctttttaaacttgtcttgggcgcctgttttaccgacttatatgaatggcgtgactgtttcattaagtgccaaccgtgatttcatcgaaaaagaatggagtgctgcatttcagctttcgataccgttgtttcagcgaaacgcgactgttaactcaggttatgcgtttaataagcagggcgatactggctaccttaacttcaaccgctctgttccgtctgaaggtggttttggtgtcgatttaacccgacgctttaatgaaaatagtgaagatttaaatcaggcacgcgtcaattaccgcaacagttatattaatactgactttggtctgtctggaaaccatgactataactactggtttggcctatccggatctctcatttatatggcaggagatttatttgcctcaaaccgattaggtgaatcttttgcattgatcgatacaaaccaagtgcctgatgttttggtcagatacgaaaacagtttaattggccgcagtaataaaaaaggccatatttttgtgccatcggtaacaccttattattcgggtaaatacagcgtcgacccaatcgacttaccttccaactttacaatcacacaagttgaacaacggatagcggctaaacgcggttcgggcgttgtgattaagttccctgttcatcagtctatttctgcaaatgtctatttgactcaggcagatggcaaacctgtgccggtagggtctgtagtacatagagctgatcaagagtcttcttatgtgggaatggatggcattgtctatttagaaaatttaaaaccgaataacaccgtaacggttcagcgttcggaccaaagtatttgtaaagcagatttttctgtagatgtagaacaagccaagcagcagattgtggtggttaaacctgttacttgtcacgaggtatctttgccatgaatataaaaacaaaaaaattactcagacatttatgtatgttttctggactgatgttgacgggaaatatggctcatgctgcatgtagtgtgagcgcttcaggtacatcttctatttcggtcccgtctatttacttaatggaaaatggtgaaaactcatcacaatttaattcgggtttgtcgtgtacaggttttagcttggctttagcaaacatgacctaccaaaaatatcgggttgagcaaatgtcaaattcatttaccaatgctcagaccggagaaaaacttaacgccattattttagacagtaacaatgaaatcattagtttaggccaagaaaaagacatgagtagctttacgctggtcaatctttttagcgggcctgatggcaatttacctttctacatacggcttccggctgggcaaagtgtatcgccgggtgtttatcaagccgactcgccgttaaaagtaaaatggttctattctgtacccgcagttgcgattgtgggaatcggggtgttctttgagagtcctgggtttagacgcggtgcattgggtattggttttaactggggaagtggggcagactcgcttggttcactctcaattactgtactgccagactgccgaattttagctcaagacgtaaactttggtacggcggcgtttgcttccaagcttgaacctgttcagtcgtctatgggaatacgttgctctgtaaatacaccatattatgtgagtttaaataatggactttccccgcaaaatggcaaccagcgagctatgaagtcacaaacgggaaatacatttttaaaatacgatattttcaagaattcatcgaatgaccgatggggaagcggtaacgagcgttggtcgagtttaaatgcaacgattaacccgggtgtacataacggggtaactcagcagaactatgtgtttactacaaaaattgttgatgaaaacgcagatacagtaccagcgggaacttatcaagatacggtcacggtacaagtcgagttttaaaagctgttttatagaggagataaaagctcagttcatgggcttttatctttaaccaaactattcaatttctaactgatcatcatctttggtaattttaatttttatttttttatatttccgcttatttggatcgagcgccgagtttattacttcatcggcaaaaggcgggcactgcatgagttttgcataagctctatagccgatgcgtattcgattaggcgggcaatcggttctttttgaatagtattcaatgagtgagttcagttcttgtaataaagtttgctgttccatcatacatacttaacaattagataactcaagcataatagatttaaaccttttgctgtgtagctgtttatcataagcacccatcaaaattgtgatggagttctctaaaataacttataaatgtattaagtttgttttggggtaggctgaggtgtttttttaattgaactgtcacaatggaaagctaagttagacctataacaaaaagaatgaagattgttgcgaacaataaaaccaagaagcaattttcaactaaagctggtctgctgtaattaagctaattcgaaagaattggcttttttatttattaaatattattccaatagatttactaagttaattatttctttactatcaaattgaatgaaaaatatattaaaagaatagcgacatttaagtcgctactcttataaaaaacgttgctttactcatgctatatcagggtgtttatcagcaagtttttgacgtttttgttgaagctcctgaattttctgatcaatattttcaattttctgttcaatagtttcatgaaactcttcaagtaactcttgtgcttcctctatattgtgagcaataggcacgcccccaattaaaggcttattggctgtttcctttaaatacattgcagtagcaatacctaccaccccgcaaatcatcaagtaataggctggaaccatcagattatgggtagtttcaaccagcgttgcggtaagagttggggttaaaccagcgataactactgagaaattaaaggcaatacctaaagcgctataacggatttcagttggaaatagggcaggtaaagttgatgccatcactccgatagacatattgagagataaagcaagaataagtaagcctataaaaatttgataatttactccagagttaagtaatacaaaggccggataggacaagaaaataagagaaaagcttccaataaaaataaatgggcgacgtccgaacttatcactcaaataaccaatcacaggttgtacaaatagcatgccaaccataaccgcaatgataataagtgcaccatgtgcttctgaatagcctaagttatgcgaaaaatagcttggtaaataagttagcaacatgtagtaagtaacgttagtgctgattactagaccaatgcacaccaataaactacgcttatgtttaacaaaaatttctttgaaactaaatttttggggtttacttttttgtgcttgttgctctgaatgctgttgatatacaggggtttcttcaaggcggtttcgtaaatataaaccgattatgcccagtggtagagcgagaaagaagggaatacgccaaccccactcggcaaagcgtgcctcacccacggcgtgtgtgatcaaggcgacagttgcagccccaagtacaaagccggctatcgatccaaaatcaagccagcttcccataaaaccacgttttcggtccggagaatattcagctacaaaaatcgcagcacctgagtattcaccaccaatggagaagccttgtacaatttttacgatgagtaaaagaataggtgcccataaaccgattgtttcataagatggaataaggccaataccaaaggtactgatggacataataatgacagtaatggccagaactttttgacgtccgtatttgtcacctaaatgtccaaagaaaagaccacctaatggacggaaaataaaaggtactgaaaatgtagcaagcgcggcaatcatttgcacgcttggtgaagtatctgggaaaaatactttaccgagaacgtatgccacataaccataaactccgaaatcaaaccattcaattgcattacctaatgcagctgcagtaatcgcttttttggttttttcgttctcgatgatattgatatcatcaatctcaataggttttacttgtttttcagatgtgcgcatatctagcctaagaattgaatctcagtatttaaagtgaaaatatacggttttaaatactgaattaaaaaattgcagaataaagagacagaataacgataagttactcaagaaaagggaattaagaggtgttctcttaatgatcaacaagatagcaaaagagaactaattatttgtttatgttagagttttaaattgtggagaaattgtatggataaagttacataagtttacttagtggtaaaactgaatcaagggttaaaaaaattatataaaaattgataaaagacatgagattagcataaaagttaagcgctattttttgagcttaaaaggccaagtttttttacttttaatatacaaaaactgaacttgccttatatcaggttttcattaatcaaacttcgttgcttcagggattgactctaaataatcaaaaaattgttgaatctgttcttcagttacacgtgctgtagaaatcggggccaattcatctctacccaagaaaccgatatctacctatgtaacgttgataagtattttatacaccccaatttaacaataaattttaattatttatccttactttttaatgatctattttaaaacaaatgtcattttgtgtgcttgactgtaatagggcagagcactatccttgcctgctggcctacattgccagccggctttgacaggctgatttagaccgcatcagagttatttcttctgaggaatagttctgtgtgtaagcttctcgtctcctcccgtagcggtaggacgggagagggacaccttcgggtgtgctggcgtctaaccagtctgtcaaccttctctcgttctgccaccataatcatttgacagtgattcggtagagcttctttagacatgaggagttttctatgcgtactatttcttatttattggcctttgccaaattctctctatttataccgcctaaacagtcattaaaacggctcaatagaccgtaggttttctacgccttaagcatcgttacgactcaaaatcatagcaacaataaacccgagataggcgagcacaccattttgtgcggttttcgcatgcctgtatttagcactcattttaagagtgacggcatttttatctctttttacatacaacaaaaaattattttaagcggtatacatgaaaaatttaggcacttcatttagagcattacacgtgctctacatagcatcggatttatttaaacaatacgggtttcataaggttggggtagaccgaattattagcgaaactaaaatttccaaagctactttttataactactttcattcaaaagaacgtctgattgaaatgtgcctcttacttcaaaaagacacattaatggaaaaagtaagagtggagatagaaacgactcactattcaactttcgctcataaactcaggcaaatctatcacttacatgccaatttaaagagcgcttattatctgttgtttaaagcaatttttgaaattaaaacgagttatcctacagcttaccaaacggcaatacgctatagacgatggattaaaaacgaaattttctgcctgcttatggaaactaaaaaagccgtttcatatgccgaagcggaaatttttatatttatgatagatggggcaattttaggacttttgacttcagacagagccgaagaacaaaccaagttgttagattactttttagtgagggttaactaaatttattgaactaaagaatcagtattttagaatgaattaactatctttttattttgaaataatgatttcttaattaaaaattaacatgattaatcttttattttattgttctagattttaaaaaggacaagttatttagactgaaaactcaccaaatactaagaaagagtgagtttataaaatctgaaataaaaatagatgaagacttaacaatataaatttttggagatattcgtggatgatcatcatttaaaaagaaaagtcggcacgcttgaaatggtcgtagccatgctgctttcagggagtattggtctatttgtgattaagtcaggtcaatcacccgttaatattgtatttttccgttgccttatttcagcattgtgtttaataccgatttgttacttttatggtcattttaaaaaagtatacttcggtaaaaaagaactgtttttaatggtgacttcgggccttctaattatttttaactgggttctactgtttgctgcttttcctaaaacttctatttctttagcgacgattgtttatcacgtgaacccgtttgtcattttatttttaggggcgttggcctttcacgaaaagctcaataagaatgatgtgctatggaccatcgttgcttttgtagggctaatcgtgattataggcttaggcagtgcttcggtgaactctaatgagttggtcggcttggggctggttcttattgccacaacactttattccatatcggtattaatcactaaaaaattaagtaatacaccgccgttattaattgtatttatacaaaccctgagcggggccattgccatgactccatttatgtcggtttttgaaaacccgccgatcggtcaacaatggctgtttgtggtcggattgggagttttgcataccgcatttctctactatttaatgtattcggcgattaagaaaatacctttaaataatattgcgatcttatcttttatttatccaatatcgaccatagtgattgattatttcttctttgatcatgtgttgactagtactcaagttttaggtgcaggtttaattttattaggcgtattgggtgtgaagttgcattggaatatttttgcagtaaaaaaagtaggaataaggaattaagatataaaaataaaaggtgaggttgttaaagcctcaccttagttataattttattttatctttttcgcttttgtgtattcggcataagcttcatctgcaaagcgtcgtaaagattcaccaattgcggcatattgatattcattaaggttagctaaagatgcacgagcagaagggtgctgcacaccgaagccagaaccgggtaataaaaccacacctgtttcatcagctactctaaataatagctcggttgggtttttatttttcatgacccaatcggcaaactcatctccatagagagttcgtgaagtgttttcgaggttgactagggtgtagtagtccacagcatttggatctgttgggacatcgacaccaagctgtctataaagtgctgcatcacgttcacgaacaacagatttgactgcttttttatagctttggcgtgagtccatcatattaaatagcgcaaataaaaccatttgaacttgctgtggggtagacagaccagcggtatggttcaaagcaacatttcggctatcggcaactaagcggtcaataaacttaatgcttgctgggtcggtggttaaagatgaatagcggtcttccagctctttcttctcttttttcgataagttcgcaatttgtttatcaagcacattgttatttgaaagtgcaatgacaccaagtcgccaaccagtcgcaccaaagtatttagaaaatgaataaaccaagatcgtgttgtcaggacagatcgcaaatagtgatttgaagttatcggcaaaagtaccataaacgtcatctgtcaaaatgatcaggtcggggcgttttttaacaatatctgccaaaatcgcaaggccttcatcactcattttcactgatggcggattactagggttcactaagaagaacgctttaatagacggatcttctaactttctaagttctgactctggatattgccagccgagtttagggtctgcctcaataagtacttcttcaagctggtagtcattaagttttggaatttccagatatggcgtgaaaatagggctaccaatggcaatacggtcgccgtttttaataattttattttcttttaatgagttaaaaatataggccattgcagctgttccgccttcaacagcaaacaaatctaaatcacttttttgcatgccttgtacgcccatttctcgtaagacatactctttaataatcgtttcacttactctgagcatacgatctggaactggatagttacagcctaaaattccttcaaccatttcaagcagaaaaagatctgggtctaaacctaactggtcgcgtacataagaaacagctttgcctaaaaagacgatgccgggtttgtcacggttttccaaaatgaaattatcaaaacgtgactggagaccaacggggcgcgggaagccacctaaaccttcaggcatataggaaaatgaaaactcggattcagtcgcagaaaacaaacccagttgaaagaatgctctacgtgggatagtggcaagaaagttcggattaccacgcccagcatttaacatcattcggtcagttttgctttgagctaattctattaaattatctttaagttcaaatgggctgagttttgcgtatttagaataatcgactttccccatgggacgtctccttaattatagtgagatgaataaaatttctaattcaatgtagaaaatcaggccaagcctacaatcagtggtccgagtaaggttaagaacacatttgctagggcataggtaattgcaaatggaacagtcggaatcgagttgcctgctttgtctaagattgccccaaatgcagggtttgcactgcgtgaacctgataatgcaccagccatcactgcaacgttgtcataacgcagaacataacgagcaaagagcatggaaagtaggagaggaaccagtgtgaccaccaccccaatcataaagagtgaaagaccactttctttaatggtttgaatagcctgtaaacctgattgtaaaccgacggctgcaacgaagcctgcaagccctaaatctttaagaagctgggaagctgctaaaggcatattgccatgcacctgatttcgacttcgaatccaaccaaacagaagacctgatagtaaagcaccaccaccagcgccaagtgttaggggcacatcacctagacgaatcacaaaaagaccaatcactaaaccaaccacaaggccagcaccatgaaaaatccagtctgtttttaagctttcaggcagggctttaccagcctctttcaccaagcggtcgaggtcactttttgtaccgtagacggtgactacatcaccttggcgtaaaacggtgtcgttacttaaaggttgggactcatcgttacgcttaatcgcaagtacataaataccgtgctttaaatacgcaggcgtattggccttaatatctcctaaagtacgattgagatatttggaatttcttaggatgacatcgctggtatccataatcatttccataccttgcgatgactgtaattcgctaccgatttgctcggcaaccgaaacaacactggcacggcgaccaaccagtaaaatgacatcgtctgtttgtaaagttagttcaggagcaacatcaataaactgatctttacgttttaaccgttcaatcgtaatactcggctcttttgcttcaatttccgcaatagtttgcccattggcttgtttaactttataaatacggccaacaatttccggcattgcgagttcttggcccggtgcgagttcaaaagcacctttgagtcgttcactctgagcttttaatgcatcgtcgtgaatttctttacccataaatttaggcaagatattcacacagacaataattgctcccaatgaaccaaaaatgtaagtcactgcatagccaatcgcgacatttgcttgaagtctttgaatttctgcgagtgggagatcaagtctagaaattgcgtctcccgcagtcccaataatggctgattgagtcatgccgcccgcagcgagacctgcagccaagcctttatcgagatgaaaaattttagccatcactaaaacagtaactaaaccacacactgccataaatactgctaaaagaatttcttttatggactgtggtccaagtgatttaaaaaactgtggaccactttcaaagcctactgcgtaaatgaagagagcaaataaaattgctttaacgccgttatcgacaggcacaccaataagacttaaaacaactgcgacgagtaaggagcctgcaactccaccaaactgaaactttccgaactggaattgtccaatccagaaacctattgcgagtgataagaacaataatatttcggggctgtgctttaaaacaccttgtaaccattcaatcattttgatctcacttttattattagctctatctttaatatataaatttatttatttttcatttttaaaaatacattatcaaaattacttaagcaaaccttcaatcctggtgattttcttaagtttaaatatcaaaaataatacttttaaaatacttgtgatcaatacataccagtaattctgactgattaaatcaacttatatttttttaatggatggtaaaatttatttacaataatataaagaatattttatgaaattaaagaatcttacttataaattagcttgaaaaatcattttttaatatattgatttataatgactagttattaagtgtcatactggtcttaattttgtataaattaaaaaaaatttacttaaaattatttttttgataattgtgtcgcataaattaatttttaatatatttgaattaattttcataaatatatttgtttcaagggggagtataagatttaaaattgctatttttgaatggactatatatttggatgcaaaaatgattaatattttggttttatattttgattaaatttattgtattgaaaaataggggtttagggctattaaaaaattgaatttgctctattggcgctcttatttttaagtgatttcctgtccgctttatgacccacacgctattttttcttattcttttttcaaacactcacatgccatactgcttaggagtgctaaattttgatggatttatgctgtcacatgctgatcttagatattttggccataaaactgtgttatctcagcttaagcctttaaatttgggcctctattttcaattccaccacacaatctgtacatattattcagcagtttcaacgatatattgaacagcacctacggtaatttttattctaaaatttccattatctgatatagcttttagattgatttatattttaatttatcttagtaataaaaagagttttgtggcacagtaaaacgataaatcttagagtataactatgaagcttaaagaattagcaggttgtgaggagtgcgataccgtctatcgtagagtcccgcttgcttacggaaaaagagcttattgtgtctgctgtggtgcagagctttatcggcataccaagccttttactacattgttagctctaattttaacggccctcattgtatttgttattgccaatagctttcccattgtcaaaattgaactgcaaggcaacatatccgaaaccactttactgggcgccgtgtgggtaatgtttcattacgatagggcatttgtcggtgttcttattttaattactacattcattgtgccacttacgtatttgttattgctgggctatgtactcggtacggtcagtatattaaagaaatgcccccaatttttagtcggtgccttgcgaacactttattttatgagagtgtggggaatggttgaggtgttcctgatcggaattctggtcacgcttgtaaaactaatgggcatggttcttgttattccggaaattgctctatgggcatttgcggtcttgagcctattaatggtttatattacttccgtaaaggtgagtgatatatggaatgaaattgataggtcacagccatggcaaaaataaaaaatgtgactcctgaaaaaatcacaaataccaatatgattttaaaacaatatccaagagccaaagatctttcactgatattgtgtcattgttgtgggttattgaattcttcaaaagtaaataaaactgatgctcataaaaatcaaattctacgttgtgttagatgccatagcgttttgcacgagcgtaagccgggaagtttaaatcgtacctttgctttagtggtggctgcgaccattctctatattcctgcaaatgtccttcctatgacggtaactgactctcttttgggccgtcagcaagataccatcatgagtggggtcatttacttttggcaaagtggagactatttagtatcggtggtcatttttatggcgagtatttttattccgatgctaaagcttcttattttgtatttcctgttgttggttgtatatatacagtcatctgcggcgtggaagtttgcaccggagcaatgcattaaactctaccgcattgttgagtttgtagggcgctggtccatgattgatgtgtttgtggtagccttacttactgctctcattcaaattcaatcacttgcaactattttagcgggaccgggttcaattgcttttggtgcggttgtggttttaaccatgtttgcatctttaagttttgacccacgtattatttgggataatttttatgcatctcaaaatacaaataaacctaaccgtgtttcttcggaaaaaaacacaattattcaggctgaacactcgcctttgaataatgattccattaatcccagtcaataaaagaacaatgagtatgtctgaaaacaaaacaaccagtgagacctcagatcatcatgaaacagatgttgaactggaaaacatgaatgatttaccagaaccccaagaaaagaaaaatcggtggaagcctctactaatctggattattccacttattgcgctgctgattgcgctttctttggcggtgaaagcactactttctaatggaccaaccattgaagtatcttttcgtaccgccgaaggtttagtcgcaggtaaaacaacagtacgctataagcaggtagacattggggtggtacggcaaatcgatcttgcagaagaccgatctcatattattgcgcgcattgatttacgtaaggatgcaagcaattttgctgctcaagattcacggttctgggtagtgcgtccacggattgggacaagtggggtttcaggcatcgacactttattgtcgggttcatatattgaagtagatggcgggaaatcacccgagaaaaaacttgaattcacaggtctggaaataccgccagtgattacgtccgatgtgccgggcaaagagtttttcttgaaagccgatgatttgggatctttagatattggttcgccaatttattaccggagaattaacgtaggacaaattacagcttataagctatctgatgacggtaaaagcgtagaacttcagacgtttattcgtgcgccgtacgataaatttgtaacgactgacacacgtttctggcaggcaagtggtattgatgtgacgttaaatgcttcaggctttaacttagatactcaatcgcttgcaagtattgttgctggtggtattgcgtttggtttccctgaaaactcaaatgcgactgtcgctgctaacaagagccgttttaatctttgggactcaaaagctgaagcattaaaagagccggatggtctaccgcgtggcgtgattatgtattttgatcactcattacgtggtttggctgtgggtgcgccaatcgacttcatgggaattgaaattggtagcattaaatcaattaatgcagagttttataacaactataagcagattcgcatgcgtgttgaggcagtgatttatccttcgcgtgttgaaaacggccaagcactcaatccaaacagcgacattttcaaagattttgttgagcatggatggcgtgcccaaatgagaactggcaacctcttaacgggtcaaaactatattgctttagataagttccctaaagcaaaacctgccactctacaaatcttgaatgatggccgtgtggtaattccaaccactgcaacagagttaagtggtttacaggcacaggtttcccaaattgctgataagttaacaaaattcccactagtcgaaattgggcaggatgttcgcaaaacgcttaagaatatgaatacagccattgagtctaccgacaagctggttaaacagttagatggtaaagttgctcctggtttacaagcaaccttagacgatgttcgtaaaactgtaagatcttccgagtctattttgtcgagcgatgcgccgttacaacaagacgtacgtaaagcactgcaacaaatgactcgtgcggctgcgtcattacagttaatggcagactatattgaacaacatcctgaatctattattcgtggtaagagaccagaggccaacgatgaaaaataaaaagaaccgatcattgcaacactctaaagtagccaaatggctgcttgggagtggagtgcttttgacagcgatagccatgacagcatgttctagttcaccaacaccaaactattatacgcttacacctaaagtgactccggtctcgaactcaactgtgcaggtgattgaggtcttgccggtcgggatcccagatcgtttagaccgtgcaccattggtgctacaagagagtaatggtaagtcgactgtacttgataatgagcgctggacatcgactttgggtacacaattacgcgataccttatcggcgggtttgcagcaaaaattaggagcaattgacagttatagcagtgggctttctggaaacaatcagcctctatatcgagtttctactgacttttctcattttgatattgtagataatagcaatatcaacgttgccgtatcttgggtagtgaagcgccaaataccgcccactcaactagagtcaacgaatccgaaagtaatctcgaatagaggagcgcagctcaattgtagaattgcgtttaaacagccgattgatcaaaaagctaaaaaaatggaagcaattgtaagtgcttcaaatgaagcgatgagccaaattattaataccatctcttcttcaattgtggcgctagattcaaataaaaagatgaacatcaataacggtatatgttcatcttaataaaggcttatttgttatacgtttaatttaaagctccttatggttaaggagcttttttatttacttttattggtaaaaattaaagatcttttaaaacagttataaatttaatcaagagagcaattttattctagctgtctatttatctaagaagatatagataagctttagattcggtaaaaggtttaaataatgaaaacaatcgggttactcggcggcatgagctgggagtctacagcactttactatcaacaaattaatagaatggttcagaacaagttagggaaactacattcagccaaaatcattctaaatagtgtcgattttgaagaaatagcagcattacaatcgaaaggtttatggcaagaagctggagcctacttagctgagcaagcacaaaatttagaaaaagcaggggcagactgtattttagtctgtactaataccatgcataaggtagcacctcaaattgaagatgccattacggttccatttatacatattgctgatgccacagcaaaagaaattttaagtcaaaatatccgaaaagttgcactgttgggaaccgctttcaccatggagcaagacttttataaagccagattacaagatcttggaattgaggtgattattccaaatgatgcaaatcggaaaatagtacatagcattatctatgacgagctttgtttaggtgtgatcaaccccgattcgcaacataaatacacgaccattgttgaagagttgattgggcagggtgccgagggcattattttggggtgtaccgaaatttgtatgttgattggtgatatcaaattttctgtgcctctatttgataccaccaccattcatgcgaaagaagctgtaaattttgcattagagcaaaaaacggcagcccgttctattgctgctggttcggtataaatactcatcagcttttaatttattctgaaatacgaacgaatcacagcccaatttgttgaaagccagcagatcagtgaacccgccgtgaccatggctgtaccttgccaaaaactgattgataactctgtctgtaaaaccagcatggcaagtaaagatgaaatgatgggggtaaaataagaagcaaccactagcatggtaatgttgccatgaataatgccaatattccatgctgcataaccgagaccaattgcagcagaagcaacgattaaagataaaattgtatttaaatcgagtgaaggcaaactcacttggccgctaaaaagcaattttagccataaggttagggcaacaccaagaaagaaaatagaaatagggttttgtcctttacccattttcttggtcaacacacagtaaaaagcccaaataatggcacctataaaggccaaaatataacttaaaggattactatgaaaattatcgacaacacgacctaaactaaaatctccgttcccggtctgaataaaaatgataccggaaattgaaatgagtaatcctaaaataataaacacattaaattttaactctctaaaaataacaaaagctaaaacagtcaggcttggccaaaggtagtttacaatacttacttcaatcgcttgttgcgccgtctttgaataggcaagtgcaaacgaaaagcaaagctcataagcaataaataaaattgcccctaaaatcaaatattttttagaaattaatttaaaatttggcaccctaaaaataatgagcaggagtaaagcacttaaggaatagattagcgtaatgccaacatctggaccgattgcagtcgtaatatgttttacaaaacccaccatagaggcccacattaggatggcacttaaaccaatcaaggttgctaaattttttgacataagaaataaatgaacttaattgaacacctgagctacagtgaaagttaaaaataattaaagtaagtcagggtaaaggaatttttaattaaaaaataggcacaataaaccaaattacctaataagtattatcagccaacataaatacttttggtaattaaactaaatgccaagtattaatttatagctaagcattagagtaagctaaacctctagaaaacacccagttatgtattaaaattttaaaaatatagacggtaatgctcagtacagttaaataaatcaactataagtctctcttctaaagcattaccctgtgtttattgcgaaaaaataataaatggagataaaagatgcttacacgttttttactgccgattttgggcactaccgttttagttacaggctgtgcttcttcctctcaatatccgattaacgagagttatggtcctgagccaaagttacctgaaccgaaaacaagcttatttccaaccgtaaatatagcaccggcacaaggttggccaagtggtgtgatgccgactccggcagaaggtttaaaagtaaaagcatttgctaaaggacttgagcacccacgttggctctatgtattaccaaatggtgatgtgctggtggctgaaacggatgctccgcctaaacctgaagacagcaaagggattaaaggcaaaattatgaccttcgtaatgagacgggcaggatcatctcatccaagtgcaaaccgaattagtttactccgtgatacgaatggcgatggtatagctgaccaaaaaacggtattccttaaaaacctaaactcaccgtttggtatggcactggtaggaaatcatttatacgttgccaatacggattcactcatgcgttttccttaccaagaaggtgaaactcatattacttcaaccggtactaaagtattggacttaccgggtgggcctctaaaccaccattggaccaaaaatgttattgccaatcgtgaaggtacaaagctctacattaccgttggttccaatagtaatgtggccgaaaatggtctagatcaagaaaaaggccgtgcacaaattatggagtttgatattgcaagtggtcagtcacgtccatttgcaacaggactgcgtaatccaaatggtatggcttggcagcctcaaagtggaaaactttggacagttgtaaatgagcgcgatgaaattggtagtgatttagtgcccgactatatgacgtcggtacaagatggcgctttttatggctggccttatagttactatggtcaacacgtagatgtacgaatcaaaccacaaaatcctgacatggtggctcgtgcaattaaaccagactatgctctaggtaaccacactgcttcgttaggtcttgcattttatacagccgaactcatgccacaatttagaggcggagcatttattggacagcatggttcttggaaccgtaaaccacatagtggatataaagtcatttttgtgccatttagaagtggtcagccctctggtccaccgcaagatattttgacaggatttttaagtgaaaaagggaaagcgtatgggcgtcctgtcggggtagcaattgatttttcgggtgcagtattagtcgcagatgatgttggtaatacgatttggcgtgtctcaccagttgctgaaacaacttatgagagtccaacccagcaatccattcgtagttcagtgactcaaccttaaaaaggttgggcaaaataggtttattttatgcaaatattacggttatctgattaccctcaatacaaagaaatggctgcacagtggttttctgaaaaatggcaaatccctgtggaagcctatcttgagagtattcagatttccattgatcaaaagcatgctattccacagtggtacattgttttaaataaagataagtatttaattgctggagcaggagttattgataatgacttccatgagcgtaaagatttaacaccaaacttatgtgctttatttgtagaagagaactatcgaaaccaaaatattgcaaaacagattttagattttgtacgtgaagacttgagtaatcagggcatccaaacactttatttaataacagaccataccgagttttatgaaaaatgtggttggcggtttttaacgttggtaaaggatgagggcactgttgcaaatagtcggtggtgataaacttatcatccccttttgctgatggagctgcacatgaacccattcaaaggccggcattttcagcgtgacatcattctgtgggccgtacgctggtactgcaaatacggcatcagttaccgtgagctgcaggagatgctggctgaacgcggagtgaatgtcgatcactccacgatttaccgctgggttcagcgttatgcgcctgaaatggaaaaacggctgcgctggtactggcgtaacccttccgatctttgcccgtggcacatggatgaaacctacgtgaaggtcaatggccgctgggcgtatctgtaccgggccgtcgacagccggggccgcactgtcgatttttatctctcctcccgtcgtaacagcaaagctgcataccggtttctgggtaaaatcctcaacaacgtgaagaagtggcagatcccacgattcatcaacacggataaagcgcccgcctatggtcgcgcgcttgctctgctcaaacgcgaaggccggtgcccgtctgacgttgaacaccgacagattaagtaccggaacaacgtgattgaatgcgatcatggcaaactgaaacggataatcaacgccacgctgggatttaaatccatgaagacggcttacgccaccatcaaaggtattgaggtgatgcgtgcactacgcaaaggccaggcctcagcattttattatggtgatcccctgggcgaaatgcgcctggtaagcagagtttttgaaatgtaaggcctttgaataagacaaaaggctgcctcatcgctaactttgcaacagtgccttctacggcacgtttgaaggcgcgctgaaaggtctggtcatacatgtgatggcgacgcacgacaccgctccgtggatcggtcgaatgcgtgtgctgcgcaaaaacccagaaccacggccaggaatgcccggcgcgcggatacttccgctcaagggcgtcgggaagcgcaacgccgctgcggccctcggcctggtccttcagccaccatgcccgtgcacgcgacagctgctcgcgcaggctgggtgccaagctctcgggtaacatcaaggcccgatccttggagcccttgccctcccgcacgatgatcgtgccgtgatcgaaatccagatccttgacccgcagttgcaaaccctcactgatccgcatgcccgttccatacagaagctgggcgaacaaacgatgctcgccttccagaaaaccgaggatgcgaaccacttcatccggggtcagcaccaccggcaagcgccgcgacggccgaggtcttccgatctcctgaagccagggcagatccgtgcacagcaccttgccgtagaagaacagcaaggccgccaatgcctgacgatgcgtggagaccgaaaccttgcgctcgttcgccagccaggacagaaatgcctcgacttcgctgctgcccaaggttgccgggtgacgcacaccgtggaaacggatgaaggcacgaacccagttgacataagcctgttcggttggtaagctgtaatgcaagtagcgtatgcgctcacgcaactggtccagaaccttgaccgaacgcagcggtggtaacggcgcagtggcggttttcatggcttgttatgactgtttttttgtacagtctatgcctcgggcatccaagcagcaagcgcgttacgccgtgggtcgatgtttgatgttatggagcagcaacgatgttacgcagcagcaacgatgttacgcagcagggcagtcgccctaaaacaaagttaggcatcacaaagtacagcatcgtgaccaacagcaacgattccgtcacactgcgcctcatgactgagcatgaccttgcgatgctctatgagtggctaaatcgatctcatatcgtcgagtggtggggcggagaagaagcacgcccgacacttgctgacgtacaggaacagtacttgccaagcgttttagcgcaagagtccgtcactccatacattgcaatgctgaatggagagccgattgggtatgcccagtcgtacgttgctcttggaagcggggacggatggtgggaagaagaaaccgatccaggagtacgcggaatagaccagtcactggcgaatgcatcacaactgggcaaaggcttgggaaccaagctggttcgagctctggttgagttgctgttcaatgatcccgaggtcaccaagatccaaacggacccgtcgccgagcaacttgcgagcgatccgatgctacgagaaagcggggtttgagaggcaaggtaccgtaaccaccccagatggtccagccgtgtacatggttcaaacacgccaggcattcgagcgaacacgcagtgttgcctaacccttccatcgagggggacgtccaagggctggcgcccttggccgcccctcatgtcaaacgttagacggcaagaaaaggttccacgaactctgatgaaaaactactttaacagccctttcaaaggggaacttctttctgagcaagtgaaaaatccaaatatcagagtaggccggtatagctattactctggctactatcacgggcactcatttgatgaatgcgcgcgatacttgcttccagatcgtgatgacgttgataaattgatcattggcagcttttgttctataggaagcggggcttccttcatcatggctggcaatcaggggcatcggcatgactgggcatcatccttccccttcttctatatgcaagaggagcctgctttctcaagagcactcgacgccttccaaagagcaggtgataccgtcattggcaatgatgtctggataggctcggaggcaatgattatgcctggcatcaaaattggagacggtgccgtgataggtagtcgctcgttggtgacaaaagatgtagagccttatgccatcatcgggggaaatcccgcaaagcaaattaagaagcgcttctccgatgaggaaatctcattgctcatggagatggagtggtggaactggccactagataaaattaagacagcaatgcctctgctgtgctcgtcaaatatttttggtctgcataagtattggcgcgagtttgccgtctaacaattcattcaagccgacgccgcttcgcggcacggcttaattctggcgttaaacatcatgagggaagcggtgatcgccgaagtatcgactcaactatcagaggtagttggcgtcatcgagcgccatctcgaaccgacgttgctggccgtacatttgtacggctccgcagtggatggcggcctgaagccacacagtgatattgatttgctggttacggtgaccgtaaggcttgatgaaacaacgcggcgagctttgatcaacgaccttttggaaacttcggcttcccctggagagagcgagattctccgcgctgtagaagtcaccattgttgtgcacgacgacatcattccgtggcgttatccagctaagcgcgaactgcaatttggagaatggcagcgcaatgacattcttgcaggtatcttcgagccagccacgatcgacattgatctggctatcttgctgacaaaagcaagagaacatagcgttgccttggtaggtccagcggcggaggaactctttgatccggttcctgaacaggatctatttgaggcgctaaatgaaaccttaacgctatggaactcgccgcccgactgggctggcgatgagcgaaatgtagtgcttacgttgtcccgcatttggtacagcgcagtaaccggcaaaatcgcgccgaaggatgtcgctgccgactgggcaatggagcgcctgccggcccagtatcagcccgtcatacttgaagctagacaggcttatcttggacaagaagaagatcgcttggcctcccgcgcagatcagttggaagaatttgttcactacgtgaaaggcgagatcaccaaggtagtcggcaaataatgtctaacaattcgttcaagccgacgccgcttcgcggcgcggcttaactcaagcgttagatgcactaagcacataattgctcacagccaaactatcaggtcaagtctgcttttattatttttaagcgtgcataataagccctacacaaattgggagatatatcatgaaaggctggctttttcttgttatcgcaatagttggcgaagtaatcgcaacatccgcattaaaatctagcgagggctttactaagcttgccccttccgccgttgtcataatcggttatggcatcgcattttattttctttctctggttctgaaatccatccctgtcggtgttgcttatgcagtctggtcgggactcggcgtcgtcataattacagccattgcctggttgcttcatgggcaaaagcttgatgcgtggggctttgtaggtatggggctcataattgctgcctttttgctcgcccgatccccatcgtggaagtcgctgcggaggccgacgccatggtgacggtgttcggcattctgaatctcaccgaggactccttcttcgatgagagccggcggctagaccccgccggcgctgtcaccgcggcgatcgaaatgctgcgagtcggatcagacgtcgtggatgtcggaccggccgccagccatccggacgcgaggcctgtatcgccggccgatgagatcagacgtattgcgccgctcttagacgccctgtccgatcagatgcaccgtgtttcaatcgacagcttccaaccggaaacccagcgctatgcgctcaagcgcggcgtgggctacctgaacgatatccaaggatttcctgaccctgcgctctatcccgatattgctgaggcggactgcaggctggtggttatgcactcagcgcagcgggatggcatcgccacccgcaccggtcaccttcgacccgaagacgcgctcgacgagattgtgcggttcttcgaggcgcgggtttccgccttgcgacggagcggggtcgctgccgaccggctcatcctcgatccggggatgggatttttcttgagccccgcaccggaaacatcgctgcacgtgctgtcgaaccttcaaaagctgaagtcggcgttggggcttccgctattggtctcggtgtcgcggaaatccttcttgggcgccaccgttggccttcctgtaaaggatctgggtccagcgagccttgcggcggaacttcacgcgatcggcaatggcgctgactacgtccgcacccacgcgcctggagatctgcgaagcgcaatcaccttctcggaaaccctcgcgaaatttcgcagtcgcgacgccagagaccgagggttagatcatgcctagcattcaccttccggccgcccgctaaatatctccttttgggttgttaataaaacatccaataagttgactgtgcgtgaaaaagaaagttttgtgtgatggcgttgaagatcgcaccgttaagctcttatgtgggatggtgcagagctcgacgactaccgataaaacgcaaccgccgcaaacagacaagaaaaagccccaactgataacagttggggcttcagtattgtgattggtggagcaatagcaccctgaacccaaaaccttctcgctcaaccggtagtggctgataacaactcgtgagggctattgcgggttaagcatttagcgatgtctagggccagactggacgtctgaacgcaagccgctgatactgtacataaccacagtatcagcggaggatacccatgtcgctggcaaggaacgccacggcgagtcaatcgcccactcaaacaaacggttacgaacgccaccaacccgaccagacgctgctctaccagctggttgagcagcactacccagccttcaaagcctcactcgaagcccaaggtcaacacctgcctcgctacatccaacaagaattcaacgacctcctccaatgtggccgtctggagtatggtttcatgcgggttcgctgcgaggattgtcatcacgagcgtctggtcgccttcagctgtaaacgacgcggcttttgccctagctgcggtgcccgccggatggccgagagtgcggcgctgctgatagacgaagtcttccccaaggagcccattcgccagtgggtgctcagctttcctttccagctacgctttttgctggctcgccatccccagctgatgggccaggtcttgagtatcgtctatcgtacactctcaactcatctgatcaaaaaagccggttacaccaaagcctctgcacaaactggctcagtgactcttatccaacgctttggctccgcgctaaatctcaatgtccactaccacatgctgtttctcgatggtgtctatgccgaagatgactatggcaagcaacgcttccatcgtgtcaaggcacccacttacgatgagctgaatacgctcgctcacaccctcagccatcgcatcgctcgctgcatggaaaagcgtgggattttggagcgtgatgccgagaatacgtggttgacactggaagagggcgaagacgatacgctgactcaattacatggtgcttcggttacgtatcgcattgccgtcggcccccagcaagggcgcaaagtcttcaccctgcaaaccttgccagggcgtgaggataaagccgactcaagcagtcgagtagccaaccatgctggtttctcgctacacgccggtgtgatggccgaagcgcatcagcgggataagcttgagcgcttgtgtcgctacattagtcggccagcggtttcagaaaaacgtctggcattaaccgccaatgggcaggtgcgttacgagctcaaaactccgtaccgcaatggcaccacccatgtgatcttcgagccgctggacttcatcgccaaactcgctgcgttggtacctaagccgcgagtcaacctcacacgcttccacggcgtctttgcaccgaacagcaaacaccgagttcaagtaacacccgccaagcggggcaagaagcccgacaaatcggaaggtctcgatactaactggcgtgacaagagtcctgcagagcgccaccgcgccatgacctggatgcaacgcctcaagcgagtcttcaatattgatattgaagtctgcgaacactgcggcggtcacgtcaaagtgattgccagcatcgaagatccgaaggtcattgagcagattctcaagcatctgaaacagaaaacagccaaggcgaatgccgccaagcagcgtgagctgccaccagaacgagcgccgccactgactcccagcctgttcgatccatcacagagtcgtctctttgactgacgaccccaaatccaacactgctcaacactgccaacttttaaacggggcggtggggcagtttgtatctctcgagctatcaggctagagattttaccgccaaatcgaaccttattagagcggtttaggctggaccggcagttaaaattggggcttgagcggtaaacgagtgagggaatttcaggtaagatacttcggatgaggagcaaaaaggtggtttatacttcctatacccctggatggacgaacaagccattaagcagtggcattgcctggtccaccatggccgccgagggagaggtttccactacagtgacaccgccattgagacggccctgatgctaaaaggcttgttcaagttgccgctgcgggcgctagaaggcttcattaactcgttgttccaactgatggcggtgcctttgcagtcgccggactatagctgtatcagcaagcgcgccaagaccgtcgacatcaagtaccgcctccccagccaaggcccggtggctcacttggtcattgatgccaccggcctcaaggtctatggcgaaggcgaatggaaaattcgcaaacacggcaaggagaagcgacgagtgtggcgcaagctccacttggcggtggatgccacaacccatgcggtcatcgctgccgaagtcagcctggagacggtggcggataacgaggtgttaccgacgttgctcaaccccttacgacgcaagataaaacaggtcagcgccgatggtgcgtatgacaccaaggcctgtcatgcgctactgaagaaaaagggggcgaaagccaccataccgccgagaaaaaatgcggcaccgtgggaggaaggccatccccgcaacgaggcggtgacggcgctcaaggccggtgaactgaagcaatggaagaaagactccggctatcaccagcgctcgatagccgagaccgccatgtaccggttcaagcaactcatcgggccaacgctgagcctgcggaactacaacgcccaggtgggcgaaatcctggctggcgtgaaggtgatgaacaagctgatagggcttggtatgcctgttcgccagccagtgaattgagtggtatcaacgggttggggaacggccatccagcgacggatttggtcaacaacgccgataacacctcgaaatcggagtttatatggcttcgtgggggagttatgtgtttgagctttgtcgcattaacgcgaatcaggggttgacggcagaaatggactggaattacacttcttagagtcggcgttgccggaaaattctgattggattagttgttcggggtgcgaaaacagtcgtagttcgggggaaaaaccgaattttgacccgaaaccgcaaaaaacccgaaatgacagttcctatcaaatacttaacttgtaggttctttcaaatggataagaatgatgttgttaagaagatacttgaatcaaaaaagtacgaaaaccttgattcagatattgttgaaaaggttgtttccatttctgagaagaaatataaattaaaggaagttgagaattattctaaaaagaaattgcatcaaatatgggggtcttactattctgcctatcctaattgggataaattattaaaaaagtacaatcaggggcagttatcaatagaagatttactaaagattcattcttcgacgaatgaaagagtcgcaacattaaatgacttttacacttatgtatttggaaatatcaaacatgtctcatctattttagattttggttgtggcttcaatccattagctttataccaatggaatgaaaatgaaaaaataatatatcatgcatacgatattgatagagctgagatagcttttttgagtagcattattgggaagttaaagacgacgataaagtataggtttttgaataaagagagtgatgtctacaaaggtacttatgatgtagtattccttttaaagatgcttcctgtgctaaaacagcaagatgtaaatatcttggatttcctacagctttttcatactcaaaactttgtaatatcttttccaataaagtctttatctggaaaggagaagggaatggaagagaattaccagctatggtttgaatcttttacaaaaggttggataaaaatccttgattcgaaggttatagggaatgagttagtatatattactagtggatttcagaaataactccgcctccaaggcactcattttcttggaaaagtactaaactctgtccaacggctggagcccattgtggtgcagaaaattcaaatatatatccattttcattctgggttacttttactggtgtatcctgacttctataacggatagatgctgtatagttattattaagtaatgaagtttcgtttatcaagtgcaattctgaaacacttactatgtttttccaaagttttggattatcttttccttggacaacatagaggatattttgaggaaaagataggtttcaactacagtttagaaggttaaaaacaaatgcatgcatggctcaaaagcaatctagggaaggtgcgaataagcggggaaattcttctcggctgactcagtcatttcattttttcctgtttgagccgttttttctcccgtaaatgcactgtataccgatatgggcagggcgaagcgctaaagtacaacaatcttattgttagctattgtcttggcgttccagaaaatctttaaactcaatagtataaagccgtaacagcaccatggttaacgcaaaaataattggcccataaatcaaaccaattaaaccaaagagttgcaaaccacctgaggtatccccagaaattctgtagttaaaataaaatgttagttgattggggaacattcatggcggttcctgatctgatcattcgccaaaactcccacaccgcggatgctcaccatgaatgtaaaagctatgctcgctgatttcctcacctttgtcacgccaaaatcaatgcataaagcccgattttcggttttgctagatgcggtaaccgccctggcaaaggatgcgtgttgcaccgttactgcgattggccgggcgatgcctggctcttcagataaggtcagtatcaaacgggcagatcgtctactcaataatcctaacctgcaacgagagctgccattgatttatgctgcgctgacggcttctattgttggccataaaactaagccgatgattttggttgactggagcaatgccgatactgccaagcgacactttatcctgcgtgccagcattgccgctgacggtagagcgttgactctgctacagaagattgccgccgcagaagattatacctgcccacacctacacggggcgtttttaaagcagcttaaagccatgctacccaaggactgtaagcccgtaattgtcactgacgcggggtttaaagttccatggctgaaacaagtgcgtaagctgggatggcattatgtagctagagttcgaggcaatgtgaagcttaaattggcagagcaggacaagtttatcagtgttaatcagctttatcggcaagcgaagaaggatccaaaaagtgtaggaaaaatcatgcttgcccaaacacaacactatgaaacgcaggccgtcctggttggcaaaggttataagctattgaaacgcgataaaaataagacgtataaggaaccatggttgttggtgtcatccttagctgactgccatgggtatgcggataaaattgctaagtgctacagtagccgaatgcaaattgaagaaagcttccgtgatcagaaaagtcaccgctatggcctgggtagcgatttgcatggtaccaagaagaaatctcgcttagagatactgctactactggccgcattggttaattggtttcattacctgctaggtagcgcagcggagaaagcgggtttgcacctgcgttatcaagctaacaccgttaaaaataggcgggtattggccctgaatttccttgggatattactttgcaaagaacccaaacagcgaatacgcaggcaatattatcagcagggacttaaacaaatactacagtgggtggttcagtgggactgggcagtaatcaaacaggctgatagctgattgtatgaatggaaattttgtggggatccctcaggttgtctagacttcttttaacagtaaagttatcataaaactgaattttattttttaggtaagtttatgcattctatccgcattcgttaagacacaactatttgcatagtgacactattttataatggtgggcttttgttgtgtctttaagaatatatgcggatatataaagtaaaagtatgcttaatttataagtatgcttttagtgcatagtttccagttataacttaattgactagctatttgtccaccctgtggatgaatagctttttttttgggaggacactgtgatgctagcttttgttttcacctaaatcctgtttgctgcataaaaaatttcaagagctaaacaggagtaaataaaaatgagtttaattattaaagcgagaaacatacgcttggattatgctgggcgtgatgttttggatattgatgaattggaaattcactcttatgaccgtattggtcttgtgggtgataacggagcaggaaagagtagtttactcaaagtacttaatggcgaaattgttttagccgaagcgacattacagcgttttggtgattttgcacatatcagccaactgggcggaatcgaaatagaaacggtcgaagaccgggcaatgttatctcgccttggtgtttccaatgtacaaaacgacacaatgagtggcggagaggaaactcgtgcaaaaattgctgccgcattttcccaacaagtacatggcattctagcggatgaaccaaccagccaccttgatctcaatggaatagatctacttattggtcaacttaaagcatttgatggagcattacttgttatcagtcatgaccgatattttcttgatatggttgtagacaagatatgggagttaaaagacggtaaaattacggaatattggggtggttactcggattacttgcgtcaaaaagaagaagagcgacaacaccaagccgtagaatatgagctgatgatgaaggaacgggagcgattagaatctgctgtgcaagaaaaacgccagcaagctaatcgattagacaataagaaaaaaggagaaaaatccaaaaactctaccgaaagtgctggacgacttgggcatgcaaaaatgactggcaccaagcaaagaaaactgtatcaggcagctaagagtatggaaaagcgtttggctgcattagaagatattcaagcaccagagcatttgcgttctattcgttttcgtcaaagttcagccctagaactgcacaataagttcccgattacggcagatggtctgagcttaaaatttggtagccgtactatctttgatgacgctaactttataataccgcttggcgctaaagtcgctataactggatcgaatggaacagggaaaacgtccttgttaaaaatgatatcagaacgtgctgatggattaaccatatctccaaaagctgaaattggctactttacacaaacaggatataaatttaacacgcataaatctgtgctctcctttatgcaggaagagtgcgagtacacagttgcggaaattcgtgcagtattggcttcaatggggatcggagcgaatgatattcaaaaaaacttatccgacttatcgggaggtgaaatcatcaaactgcttttatccaaaatgcttttaggaaaatataatattttgcttatggatgaaccaggaaactatcttgacctaaaaagtattgccgcattagaaacaatgatgaagtcctatgcaggaactattatcttcgtatctcatgacaagcaattggtcgataatattgctgacattatctacgagatcaaagaccacaaaatcatcaagacttttgagagagattgttaatgatagccaatctaatccgaacattaattattgaactctttaaaggaaattaaaaatgacaattcaagatattcaatcacttgctgaagcacacggcttgttgcttacggacaaaatgaatttcaatgaaatgggcattgattttaaggtcgtttttgctcttgatacaaaggggcaacaatggttgctgcgtattcctcgtcgtgatggcatgagggaacaaatcaagaaagaaaaacgcattttagaattggtaaaaaaacatctttctgtagaggttcctgattggagaatttcatctacagaattagtggcttatcccatacttaaagataatcctgttttaaatttggatgctgaaacctatgaaataatttggaatatggacaaagatagcccgaaatacataacatctttggcaaaaaccttatttgaaatccatagtattcctgaaaaagaagttcgggaaaatgatttgaaaattatgaaaccttcagatttaagacctgaaatagcaaacaatttgcagttagtaaaatctgaaattggtataagtgagcaattggaaacccgctacagaaaatggttggataatgatgttctatgggcagatttcacccaatttatacatggcgatttatatgctgggcatgtactagcttcaaaggatggagctgtttcaggcgttattgattggtcaacagcccatatagatgacccagcgattgattttgctgggcatgtaactttgtttggagaagaaagcctcaaaactctaatcatcgagtatgaaaaactagggggtaaagtttggaataaactatatgaacagactttagaaagagcagcggcctctcctttgatgtatggtttatttgccttagaaactcaaaatgaaagccttatcgttggagcaaaagctcagttgggagttatataatttaaaaatatgattgctgagaactgccttgttttgaaacttggttggctttaattagtttttagtattctttatagaaaatgcctcgatcaaggggcatttctaacaatcatttaacataaaatttcttatacgaaatgcttgatatttctctttaaatatcattatattaacgtaagccgttctggagtatagggcaccagaacggctttttattgattattcatgttccacgatcactaattgagcgatgttccacggttttattcagttttaataaacatcatccggttttttgaggagtcattatttcaagtgcttgcactgaaattggctcttcaaaaaactggagtcttggctaaccatatggaaggaaaaagcggcttaggaagcctctcttcttctgttctggttcaacatgctccgggataggaatacgcttattgtcttgctgaggagtagtcaattcgtcatagttcgttgctagttccgaccgaggatccgttgctatatcctgtttaaagctctgatcggtaaaggtagtcatattggcttttggtgcttctagtaagcgctgcatagcttcaatctgttcttgataagtaagcgtaacaccaaccacaccttgcggtgtggctgttgatcagtaaggcagtagttgttgcaattgctcgtgggtattggctttgggcaactctgtcagcaaccggcataagtaatcatagggttccagaccattgattttggcggtttcgaccaagctgtacaatgcggcactggcctgtgcacccgacttggtattggcaaacagccatgccttgcgaccaatcacgaacggtttgatggcgcgctcagcgcgattgttgtcgatattcaacctgccatcatccagatagcgcatcagcttgggccactggttcaggctatacgtaatagcggctcccagtaaactttctttcgtgacactctcgcttgatttatccagccagcttttgaattgttctaacagtggcttggctagcgtttgtctggcgtcatatttcttatcaggcggcacggtttttaattgactctccagtgcatagagtttctggatatggttaagggccacatccgccttacccgttttgcctttaccctgcgctttttgtgcttcaacgaacttacgtctggcatgtgcccagcagccgactaaggttgcatgggttttctcatatccggcataaccatcaacctgcagatagccggcaaaccccgccaggaagtcggtgggatgtatgctgctgcgactatcctgataatcaaacagcaccagtttggggccagtactttgctctaagccacagccatatacccacatgtagcaggtgcttttctcaacatccagcacattaaccgtggtttcatctgcccatagcaccggctgtttcagaagctcagctttcattaacgccagtaacggtttcagtttctctgcacagcttatcagccagcggctcatcgtttgacggctaagctcaatgccggcctgattaaacaactgctcctgacggtacagcggcaagccatagtgcattttgctgctgatgatttgggcaagcagactcggtgtggccatgcttttcgggataactgctggcggcacatcggcaatttttatctcgaccttggtgccgttggtctcacactgccggcagctgtatttcagccgcacgtttctaagcacccggatttgtgctgggacgaactcgagttgctcactgacttcttcacccatttgatgcagcgcatggccgcagcaggtacaggttttatcgtcaatatcatggataacatcaacgcgcggcagctcaggggcaatccgtgggcggcgtggcttagcggctttctcagcgctctcggtcgtctgattatctggctctgtcgctactgactcgtcttcaatcagctgttcggcctcatttaagacttcgccatcaccttcgtaggtctcgctgctggggctaaatttctggtacttcttcaggttgtaacgctccagcaattgctgcagcttgtccgacagttgctggttaacccgctctaatttggcgatgcgtttatctttttgcgccagtttccgctcaagcttttgcgtctgctcaagcagcattttcttgagcagttcaacatcatcaggtaaggattgaggtgtctttttcatggccgctattgtaacggccaattggactaagtgcttggtaagatttagattgttttggatgcgatcacaaggatttatagccgatcgtcatatcagcccacactctggtaatgcagtggctgatgggcggtgattttttgaatatcgacaccttgcaacagccaatgccactgttgttcgctaatagacaggattttgccaggcatctgccttggccagcggaacttgtctttttcaagccgcttgtaccacaagcaaaagcctgtgctatcccagtacagtacttttaaccgggtacgctgctgattgcaaaatacaaacagtgcgccactaaaaggcgagagctgcatctcttgctcaactagcaacgataaaccattaatagatttacgaaagtcgaccggctgtttatgcaaatagacctggggcacatcaagaaacattttcatggtcagagcgctctgagcaaggccgctaaccacagcacatcagtgccggctggaaactgcaattccacatcacgcttacgtagtaaaatggatttattcagctgcaagccctgtggcgtcagctcaataaagccaccgtcatcatcctgaaacgccaacaattgtctcttgcgataactaaaatatgtaggaatgatgccctgacgttttgcaaattcagtttgggtgaggccactttgggcttgctcggcgaataaagcgaaccattgttctttggtgcggtgcatgatgattaccctggcagttgataatggcagacagggtaaagttgatcagttaggattggaatgtgtggttggcgttacgcttaccttgataaaacgattcacgttctaaagattgattttctctctgtattgcctgatttaattgtttttccagtatgtcaacttgacgttttagtaagtcaacttctgtcaagttttgactgttaattgattgactttgattgactgtatcctcttttttttgtggttccccaaaaactcttagggcctctgaaaagtcaattaatccatcagatcctttagataaatttcctttgtttatatgtgcatatatggcttgtcttgaatatccataaagcttagctaactctgaaactgacagttttttcattatgtaaaccagttttcaacttgtgttaatacctgactgttaacttaacaatttcaattaacaatgtcattgaaatcctaattttctgagtaaaggaagtaattccttaaatttctctgcatcttgcagcatggcagctatacgtacagcaaactgctgatagctttctgtgccttgtgaatatttactcatctcaggaagctctgagagcttgttggcgaatagatggcgttgtttatctgttatttttgaaaagaggtctaatgtattcggatctcttttagattcgactgaatgcgtggctgattttttctgtttaaagctaaatgaaaaaccagtaatagatctacctgttttatgctgttcaactttgacaataatatcggtatgttcatttacttgttttaatgcaatgtctaaaacatattttttaaaatcatacattcgtttgtattcagtctcgagtacacctattttttgtctaaaatcatacatagttatgagaggcgtttttccagtactacgccatgcaatcaatatttcatataaacgaacagcataagcacttgttaaattacttatttgttgtatttcatactttgtaaattgttcttctaacctagtaattaaaggcacaatagcaggggcaaaaataagtctaacgacagcttcattatcaatataagccacctcgctcacccatcttgatttgtgattaatagtgttacctttttcactaagactctgataactgaattgtcttgcaaacaagtcatcgcaagcatcttttaacgcctgataagccgtatttcgatgtacacgggcactgttgcaaatagtcggtggtgataaacttatcatccccttttgctgatggagctgcacatgaacccattcaaaggccggcattttcagcgtgacatcattctgtgggccgtacgctggtactgcaaatacggcatcagttaccgtgagctgcaggagatgctggctgaacgcggagtgaatgtcgatcactccacgatttaccgctgggttcagcgttatgcgcctgaaatggaaaaacggctgcgctggtactggcgtaacccttccgatctttgcccgtggcacatggatgaaacctacgtgaaggtcaatggccgctgggcgtatctgtaccgggccgtcgacagccggggccgcactgtcgatttttatctctcctcccgtcgtaacagcaaagctgcataccggtttctgggtaaaatcctcaacaacgtgaagaagtggcagatcccgcgattcatcaacacggataaagcgcccgcctatggtcgcgcgcttgctctgctcaaacgcgaaggccggtgcccgtctgacgttgaacaccgacagattaagtaccggaacaacgtgattgaatgcgatcatggcaaactgaaacggataatcaacgccacgctgggatttaaatccatgaagacggcttacgccaccatcaaaggtattgaggtgatgcgtgcactacgcaaaggccaggcctcagcattttattatggtgatcccctgggcgaaatgcgcctggtaagcagagtttttgaaatgtaaggcctttgaataagacaaaaggctgcctcatcgctaactttgcaacagtgccaggatgaggaaggcgagatggtacgtatgtatgtagcagatactttttaatagaacttaaagagcatctattaaaaaatagcctctagtgaggctattttttatggcttatttatttttaaaatttttaataatcattagaagggcgaccagtgacaataagataataaaactaatataactatttgccgtactcatcagcccaattttacctacaaaatagccagctaaaattgcaggaatactaaaagccaaataactttcaacaaaaaaagcagccataagacccgcacgttcttcgggaagtgccaatggcattacactacgaatagcccccataaatgctgtaccaaaaccaactccagtaataatagaacctaaaaatagaactacagcattggttagattaatggcgatgaataagacaatggcaccaatagcaatcgagagcgtaccggttaataaaatacggaaatttgtcgacttcctaagcgttaatatacctaccgcaccggaaagggcgagcgccataaacataatcccgtttagccatgccgatgacgtgtggaaaatttttgccagtaaagatggcataagcgataggaagaaaccactgaccatccaaagtgcaatgttaatcgggctaatactcaataaagcgctttttgtctgtggcggaatggccatattgggttttaatgaagcaagtgcaccggatcttctttgtgcggtctctggagtaagaaaacttaaaatgagttcacaaataagaagaaaacataagaactcaaaaacaagctgtaaggggtgggcagagaattgcaaaatagaacaagtcagaaaaatcccaacagccatacctatcattggtgcaatactattaattagtgaaccatgaagcttactaaaatctaaaattgctgcgcctatagctgaaacagcaagccctgttgcgattccttgtaagcctcgtgcaatgaataacatcgaaacatctgaagcaaataagaaaaagctcattgaaataatttgcaaagaaatagctgcaataatgactgggcggcgtccaatataatcagacaaagaaccaataatgagtaatgagccaagcagcgtaaaagcataggtggcaaaaatcaaagtcaatgtaaccggtgaaaattgccaaagctgttggtatagacggtagagtggtgtcggcgcactagatgcagccatgaatgtcatgagcgtgatggtattaagtgtcaaagcacttgccgcatctaattgaaaaacagctcttgaccgttttgaacttgaattgttcatataagatgaataacataaaagcaaatatttagcttttatacattatttttccactaaagcaaatccttagctttagtgtattttgtatatagttataaatatttataaattttttgatccctttacagagtttataaatggcaaaagttgttactggattacgccctggtggacgcagcgaaagaatacaaactgcggtgcatcaagctgtaaaagaactacaaaaagattttgagcaaagccaaattactattcctatgattgcagtgcaggcaggggttacaccttcaaccatttaccgtcgatggggtgacatcaatcaattattttcagatgtagctttaaatgaactcaaacctgacatggaacccaaagatttaggttcgttccaacaagatattacagcatgggttgagcaatattttgaagaatatgcttcagaggttgggcaagacttattgcgagatgtactctatacatcaaactcggattctaatgcccgtaaatgtgagactttaattatccagcagctcgatattattcaaaacagggcaaaattacgtaatgagcttactatacctaatcaggtaatcatcgaggcagtgattgcacctatgttatttcgaattttattcaccaatcatgaacttagtcttgagtatgtatatgatcttttaaaccgtctttttataaaaaataagtagataaaatctataaaaagactagtcccttgtttttattaaataaatatatatcaatctttcttattatttaaaaaataaattctcataatttaagattgatatgaggatgagttaatcatttatttttgaaatacttgttctgcctatttaaaaatcaaaaataaacatagataatgcatgatgtaattaattaaattattttataaacatgcatttatgtaaatttttaaagacttttagttttatgaaacttattgagataaatattttctatacaaaaatatgcatggtttttaaattttacattttttaaatttatgacacagggtgttttttattctttacaatggctccacttcatttaaagcagcttgtggtgcacgctttatattttatttttttatccccatcgaaaaggtatttagataatggatttcaatacccttgaccaagaaacggtacagaaaaaacaaaagtttcatcaaattttgtatgtacaggtcatctttgcaattattttgggcattttaattggtcatttttacccagaacttggcgaaagcttaaaaccgcttggtgatgcattcatcaaaatcgtcaaaatgattattgctcccgtaatctttttgacagtggttaccggtattgccagcatgacgaacatgagtcgagttgggcgagtgacaggtaaggcaatgctatatttccttactttctctagccttgcgcttgtggttggtatgattgtggctaatatcattcagcctggtaaaggcctaaatattgacccggcaaccttagtcaacgataaagtaaatagttacgttgaaaaggctcatgctacaaatatcactgactttttcatgaatattatcccgcaaacattagtgagtccgcttgctggtggtgaaattttgcaggttctatttgtggcagtcctatttggtatttctttagctgcattgggtgaccgtgcacgtccaattactgattttttaaataacctcacggctccggttttctatttggttggcatgttaatgaaacttgcaccaattggagcttttggtgctatggcatttactatcggtgcgtatggaattgaatcaatcggtaatttattactattgattatgaccttctatatcacggcagtgctgttcgtattaatcattttaggggctgtagcacgctacaatggcttttcaattatcgatttaattcgttacatcaaagacgaactctggttagttctaggtacaagttcttctgaagctgctttaccatctttaatggataaaatgcaaaaagcaggttgtgaaaaatctgtagtaggtctagtcattccgacaggttactcatttaaccttgatggaactaacatctatatgactatggcggctttatttattgcacaagcatgtaatgttgatttatcaattggtgagcaggttgcattgcttttagtggcaatggtgagttctaaaggtgcggcaggggtaacgggcgcaggctttattacactcgcagctactttatcggtagtacctgctgtaccagtggcaggtatggcgcttattttaggtattgaccgttttatgtcggagtgtcgtgcattaaccaatttaattggtaatgcatgtgcaaccattgtggttgcccgttgggacaaagctctggacaaggacgttctagataaagctttacgcaaatcgaaaacgaattaattttttaattcgaaataaaaaacctgtagcaactggcaaatcgggagaggtgctgtgctacaggttttattatttaatgatcaaaaaaatataatttaaaaactatatactcattaatagttattaaggaaagccactataaaaatttcacaaattttcgtatagaactactttttaaaaagcagaacttttgagttatctacactataaaaatagtatataaactagcttaggtttatgcttttaagtgatcctcaaattcttcacctaactgcattgctaaagcattacctgccaaatcacaggtcactaagccatattcttttttaaaactgaaagtaaaaccttttccatcagcaaggtttttaaccgaataccctaatttttctaaccaaatacggaacgcaattaaatttttcgctttaacaacctttttcacgtgagaactccttctatccgtgtcttacaccttatttattaatagggatttactcgaattttttaaagggggaaaactttgttttattttgcatcttgtaaaaaaagtaaaatagataaagcaatatccttcattttataaatttattctctgtacacgataaaaatagataactcattgaaataatgtcataataattgttttctaacgacgaatactatgacacatctcaatgagttatatcttatcttaaacaaatatctaaaatggaacaagtcacatttaaagtgctttgcgctcatcatgcttgtgattattttaaagcaaacatgtaatctttcttctgcatctaaagccttgcccatcaagtgcttaccacaatcattttatcgacgtatgcagcgcttctttgcaggtcagtattttgattatcgtcaaatttctcagttgattttcaatatgttttcattcgaccaagtgcaactgactttagatagaaccaattggaaatggggaaaacgaaatattaatatcctgatgctcgcaatcgtttatcgtggaatagcgatacctatcctttggacattgcttaataaacgtggaaattcagatacgaaagagcgtattgctttgattcaacgctttatagccatttttggtaaagaccgtattgtgaatgtgttcgcagacagagagtttatcggtgagcagtggtttacatggttaattgaacaagacatcaacttctgcattcgtgttaaaaaaacttcattgtcaccaatcatttaggaaagaatcataaaattagtgatttatttcgccatcttaaagttggtcaaattgaatgtcgtaaacgacggattttggttggtcgggtgaaactatatataagtgcactacagttagaaaatggagagcttttactcgtcgtttctcctcagtttaatgccaatgctattcaggattatgcattacgctgggaaattgaaaccttattcagttgtctcaaaggacgcgggtttaatcttgaaaatacgcgcttgacagaccctagacgagtgaaaaaattgattgcggtgttagctataagcttctgttggtgttacttaacgggtgaatggcaacatgatcaaaaaaaagcgataaaaataaagaagcatggacgactctcaatgagtttatttcgctatggtttagactatgttcaaatggcgattcagcgtttaattggttttgggaaaaaagaagagtttaaggaaattttggcaattttaagaaggcagaaccctgataggataagggttctgtgaaatttgtcgtgtacagagaaatttattaagtttttatgtaattaatctgaatatttataaatcctaagcttttgttttttatatatattttaaaataatggtattgggttgaaatttaatcaatttaaattaatctaaaaacaataaatgtaaaaaataatttcatgcaacatgctttattcaaaaagatacagttcttaaaattaaactgtatcttggttgaaagcttataattttaaaaattgtcttttaagctacgtaagtgagcgaactcatctacactttcagcacgtaaaaacggatttgttgctagttcaagttcaatactacttggcaaggtaattttaccttcttgacgaagcatgcggacttgttcagcacgttcttgcagtgcgtggttttcaggttctacactcaaggcaaattccgcattagaaagtgtatattcatgtgtgcaatacactttggttgcagtgggtagtgcagcaagacgatttagtgagtggtacatttgttctgctgtaccttcaaatagccgaccgcatcccattgcaaacaaagtatctccacaaaagagggcattaagctcttcaataaaatatacaatatgacctaaggtatggccgggtgttgcaataatctctacatttaaatcattaaattttagatgatcatcgtgttgtaagggatgagtaatgccagggattttacttagttcatctcttgggccatataccgccatagacgtgttagccgttaaatcagcaacaccgccgatatggtctttatgccaatgggtaagccaaatctgttttagagttaattgatgttcttggcaaaagtgggtgactaactcagcctctgttggatcaactgcaacagcttcatgagtctcagtatcttctaaaatccagatatagttttgtagggcattttgcacatcaatataatgaattctataacgcatttttttatcctgaaactaaatccaaaagcagtatctacgggctaattttgataataacagaaattaccttgagtaacgtgtctaataaaatgctctataaattagactctctaaaataaaaaagccctcatggaagagggcttttgtaggagttcaattagcgcatttttgcgagccaatttcctagcatttgaacgatttgtaccaaaagtaataatacaataaccgttaaaataacgacgcttgtatcaaaacgttgatagccataagaaattgccaagtcaccaataccaccagcaccaactgcaccagccatagcggttgcaccaataaggctaatcgtagcagtcgttaagttcaaaataagcgaactacgagcttcaggtaagataaagcgcgaaataatctgccaaggagttgcacccatagcttgagcagattcgataattccttcatttacttcaagcagggaagtctcaataagacgtcccatatatggcccaacgtaaattgttaaaggaacgatcgctgcccatgtaccaattgaagttcctaccaataatttggtcagtggaataactgcaataagtaaaataataaatggcagagaacgtaaagcatttacaattgggttgagtaaatgataaatgaatttatttggcaaaatgccttctgggcgggttacaagtagaataatcccttggataaagccccaaataccaccaaataaaagcgcaaagaacaccatatggaaggtttcttgtaacgcagttacaaactggtcaattgaaagtgaactgtgccagaaaggttgagtaagttcagttaaccactgtacgattaaatctctcatacttgatctcctgattgaactacactcacttcatttttctctaaaaactcaatcgcctgacgaatcaactgtggatcacctaaaagctgtacaaacatctgaccaatgacggtgccgttaatttcagtcatattggcaaataagatatttaaactaatatcaaattgtttaataagcgactgaatcacaggctcttgtgctgaacgccctaagaactgtaagcaataaatgctgtgatgatgctggttttcaagttgatttaaaatatttacaggcaactgctgatgtaaaacagtttgtataaagtttttagttgtcggatgttgtggattactaaagatatcaatggttgagccttgctcaatcactttaccagcttccatgacagcaacatggtcacatacagtctcaatcacatccatttcatgagttaccatgacgattgtgattttttgctcttggttaattttctttaataattctaaaaccgactttgtcgtttgtgggtcgagggcagaggtggcctcatcacacaaaagaattttagggtggttggctaaagcacgagcgataccaacacgttgtttctgaccgccagaaagctcatctggataagcatcttttttatgcttaagatcaatgaattcaagtaactcatttaaacgcttttcacgttctgctttgctgtaatttagcagacgcattggcatttcaatattttcagcaactgttttggtttgaagcaaattgaagtgctgaaaaatcataccaatatttgcacgttcctgacgtaatgaacgcgcatccaaagcagtgaagtccttttgattaatgataacctgaccttcatttggtcgttcaagtaagttaatcaggcggattaaagtacttttacctgcaccactatagccaataatgccgaaaatactgccttcaggaatttccaaattaatttggtccagtgcacgtatagtttggcctttaagctgatagtgctttgaaatgtttttaaattgaatcatgtcgtcaaaaactatgctaaaaagaaaaaacaggcaaagagtctttgcctgtttcgcgttgcagctattatattactatttagcttgcgtgaggtagctgattggctgattcacgtcaacttttgtaccaccaaagtgctgttcaacgtattttttaacagcttcagtgtggtaaagctgaccaactttctgaagaacagggtcatctttacgtgattcagcagttgcaagaatatttacattcagctttgtgctttggtcaactggctcataatagatagaatctttaagcacatttaaaccaccttccattgctaaagtattacctaaaacaattgcatcaacttcgtcttttacacgaacagcagttgccatctgaattggtttaatgtcaatttttttgctgttgtcagtaatatcgcttggagtgcctttcgctggatcaaagtcagctttaagcttgattagacctgcgctttgtaacaataacaatgcacgagcttcgttcgctgcatcattaggaatagcaatgcttgcaccttgagggaactcatcaacttttttgtatttacttgagtaaatacccattggttcaagataagttgtagcaacaggagcaatcttatctttatttgaagcattaaatgcaacaaggtaggcataagattggaatgcatttaggtcaacttctttgtttgcagtagctgtattcattgcaacataatcagtgaagtttttcacctcaagtttaagaccggcagctttagtttccggtaaagttgcaatatagcgccaaatatcagcgtcagaaccagtagaagcaatgactacagtttgtaactgagcagagtctttgccattttgtggttcattttgctgtttgccgcaagctgcaagtaatactacagacacgcttaaaaaaagactgatcagctttttcatgtaaaaaaagtcctgattatgagagatctcaaccattcaggttggctctcagctgggaaaattggtgatgttgaaagttccaacggtttaaccaatcataacaataaaaacatattcaatatagtggacatgtttcgatcttattaatcagaattgaataaaaattaagattaatatgaatatttgtgataagtgaataagcaaaataaaaaagccctcataagagagcttttttactatttaaatttttattcagctttttcacgagcaatagcacggtaaccaatgtcactgcggtattgcatacctgtgaaggttacttgcccacatacttctaaagcattgatttgtgcttcaagaacgctgtcacctagagcagtcacgcaaagtacacgtccgccagaagtaacgatatggccatcttcacgagtagcagtgcctgcatggaagattttagtatcttctggtgattgaccgatacctgagataacgtcacctttacgcacgctgtctgggtaaccttctgctgcaagtacaataccgattgacttacgctcatcccattctgcttcgcttggtaagttacctgcgatacctgcttcaaccaaatcaacaagagatgacttcaaacgcatcatgataggttgagtttccgggtcaccgaaacggcagttaaactcaattacgcgtggttgaccttgttcatcaatcattaaaccagcatataagaagccagtataaacatgtccatcagcagccataccatcaacagttgggcgcataatttcattcattacacgctcaaaaacgtctggagtcacaactggagcaggagagtaggcacccataccacctgtgttaggaccttggtcaccttcaaaaatacgtttgtgatcttgtgaagttgccattggtaaaatgtttttaccgtcaatcatacaaatgaaagaagcttcttcaccagcaaggaactgttcaattacaacacgtgagcctgcatcaccaaatttgttgcctgcaagcatgtcatcaattgctgcaaaagcttcttcattggtcattgcaacgataacgcctttaccagccgcaagaccgtcagctttaattacaattggtgcaccatttttttcaacataagcttttgctgcatcaacttccgtaaatacttcataaaaagcagttgggatgttgtggcgttttaaaaagtgcttagcaaatgcttttgagccttcaagctgtgctgcatattgagtaggtccccaaatttttacgcctgcttcacgtgcagcatcaacaacaccatttactaatggcgcttctgggccaacaacaatcagttcaacattattttctttagcaaaagcaataattgccgggttgtctaaaatatcgagctgaacgttaacgcattttggttctgttgcagttcctgcgttaccaggcgcaacgaaaacttgagtaactttggcatcttgcgcgattttccatgctaaagcatgctcacgaccaccactacctaaaactaaaatattcatttttaatttgttccttaactttaatcctttttcatccccctctatttctcaaggtggagagatagttccattattgtggaaaaccctcctgaataaaaggagggttagggaggactagatttaaattagtggcggaaatggcgcataccagtgaagaccattgcaattccagcttcatcagcagctgcaataacttcttcatcacgcatagaaccacccggttgaataatgcatttaatgccagctttcgctgcattatcaataccgtcacggaacgggaagaatgcatcagatgccataactgcgccttcaacaaccagaccagcatgctcagctttaattgctgcgatacgtgctgagttaacacggctcatttggccagcacctacaccaatagtttgacggtttttggcataaacaatagcgtttgattttacgtatttcgcaactttccatgcgaaaataaggtcatcaatttcttgttctgttggtgcacgtttagtcacaactttaagatcatctttggtgatcatgcccaagtcttggtcttgaacaagtaagccgccgttaacgcgtttatagtcaagttgtggagcacgtgcatcaattgcaggtaattcaccacatactaaaacacgaacatttttcttcgcgccagtaacttcaagtacaccatcagcaatacttggagcaataattacttcaacgaattggcgatctacaattgcttgagcagtagcaacatctaactcacggttaaatgcaataataccgccgaaagcagattctggatctgttgcgtaagctaaatcataagcagctttaataccgtctaaagaaacggcaacaccacaagggttagcatgttttacgatgacacaagctggttttgcaaatgatttcacgcactcaagggcagcatcagtatcagcaatgttgttataagacaattctttgccttgtaattgttttgcagtagaaacagaagcttcttttgcatttgcttcaacatagaaagcagcagattggtgtggattttcgccgtaacgtaaatcttgtgctttgtttaattgggtgttgaacgtacgagggaataaatctgcttcaccttcggccttaccaacgcgagcgcctaagtaagaagcaatcatgccgtcatattgagctgtatgttcaaatgctttaaccgctaaatcgaagcgtgtttcgtaagaaagtgaaccagaagcttttaattcgctaataactgtatcgtaatctgaagcatttaccacaataccgacagatgcatggttcttagcagcagcacgtaccattgttggaccaccgatgtcgatattttcgatagcatcagcaagagaacagttaggtttagctactgtagccgcaaatgggtaaaggttaacgacaactaaatcgattggatcgatgttgtgttcttgcataacagcttcgtctagaccacgacgagccaaaataccgccatgaatttttggatgtagtgttttaacacggccatccatcatttccgggaaaccggtatgttcagatacttcaacaacagcaatattattatctttaagcaacttgtatgtgccgcctgtagataataattctacccctaaagctgcaaggttttgagcaaattcgacaattcctgttttgtctgatacagaaatcaaagcacgtttaatagtcatgatgttcaagtcaacaatttcaagtctacggattaaaaccaattagaagcacaaaaaaaatgcccacgaagccgtgagcattttatcatttattcactcattaaaccgtgagcttttaactttttacgtaaagtgccacggttgagtccaagaatttctgcggcacgtgtttggttaccacgagtatattctagaactacagataaaagaggtttctccatttctgctagcaccatgtcatatacctgagatggttgctcaccttgcaattgtgcaaaataatggcgaactgcgcgatccacgtggatgcgaagagcaacatcagattgtgcagtaaaaataggagatttgctattcatgcgagttaatccgaaaatcaaatactagcttgggtaaagtagtatataaatgtggtctaaaaatacggagtcctgttttagatcctaaaacagtgactctaaaacataagaacaattagcttgccatatttcttcgtattgagtaaaaaataagcgtaacaataattaaatatttgttacagccccctcaaaaacaaaaaaagttaggctatgcgcttaatgtagaaaagcacacatgcttaacagtatattttttgaattgagagcgaggagtatatgagtcaaagctttcgtggcgcgtatcataccattgtctaggaaaaagtgagcaaattaactgcattttttttaattttttttcactttttttacaaattaggggtggacaatttctaatcgataatttactaggctttttttgcttttatttagctcaacttggaatctaaaaggtgtattggtcggaatgcgttgaataccccgtaagttttcgaccaagtattgttgaggggtaaaaatgatttcttcttgatcggtttctttgccaaagctgagttttaggttgggcaactcaatacttttattattctgatttatgagaacacctgaaagttgagtatgctctgtaccaattttacgtagctttaccttttctatataaagaagttgatattgttcagctgacttgttgcaatgcaatatttgacaaacataattaaatgcatggctaatcgcagggctttgttgcatgagtttagggttaaaccaaagaatctgaaaagtaaaaaccaaaatcagaatcagatttgcagaactccaaagcgtatagtacaaccagctatgctttttaccgttatcttgttcaggagaggttgcttgctcagccaaattaagattaggaagagcattaataggttcattatggaagtaatttaaattattcaaataagtcaaaagatcaatattagagttttcaactttttgatcaaagatatctaacacatgagaatgggtcatatatcgtgtttgcatagagccatgagctaaagcagatgagtttaccgtttccggctgctcaacatttactaaattagtcagagcattaaaatttaaattacatttagggcaacaaaccataccctgagcaacagttaactgagtaagagaaactttataaactgttagacacttagggcagcgggtttgtttttcattcatgagttaaaacatctcaatttgttgttttacgttttcctgaaatgcggcaccagttttcttcgcgcttttcgacatctaatatatcaaaaaattcagaataaacacctgaaacatcagcaacttgctcttcgattacaccagcaagtgcgaaatcaccatcagatttaagtaattttgcgaactctggcgcaagtgccattaaaggacccgctaaaatatttgcgactaaaacatctgcttgttgaggtttgaattcttgatcaaactcttcaggaagacctacatataaacggtctaatacaccattgagttctgcattttgtttagttgctaaaactgcttgtgggtcgatgtctgtcgcatagactttcttagcgcctaataataaagctgcaacacctaaaatgcctgagccacagccataatcaatcacgatcttatctttaacatcagttttacctaaccattgtaagcataagaaagtacttgcatgattacctgtaccaaaagcaaggcctgggtcaagcttaatatttgtagcatctgcttctggtggctctaaccattcaggaacaatccagaatttttccccgatctgaattggttcataataatccatccatgcgcgttcccaaacttgatcttcaagttcttcatgacgcatcggcacatctggaagttgtgcttttaagaaagcttctaaagtatcaacatcaattgggtcttgttcgtcttgttggtaaataccagtaacaatgactttgttccagagtggtgtttcacctggtaatggttccagtaaagcctgatcttcggcatcatccaaagttacgcttaccgcacctagagacattaaaagtgtttctgtgaattcaacttgttcttgatcaacggtaatgtgtatttgtaaccacttcacgaaaaggacctaaaattttatttaaaggcatattgtagccgactagagtagtttaaaaaagaaaacggcccatctttaatggaccgctttttgaaaatgatgatgtgatatagaagaatataaaacgatttctctatatcttaagtcaaaactgtattaaggagcaggggccttgaattgtaatttgccattttcgttcggctggcaagtaccattaaaggttacaccgttgtgattgtaagaaacccattcaccttgctgtttttttgcacacactcgaatttgtttttgagtttcggctttgctcgtgtcagcagcgtgtgtaaaagtgacgcctgaaaaacaaattagagatgctgttaagattttcaacatggtcgttttcattttgtgttccttctagttgcgttaattttaaagtcatagaagtgctgtacgttttttattctaaaatgaaaaagttttaaaaacattcactttgtattgaattcatgaaacaaaatgtcaaaacatgtggcttaccgtaaatcatgtcacgacaattttgtaattatgtacatctataagcagataattttgctataatgttccgtcttttttttctggtgtttttgtactcatgcactatcctaaagtttatgatgttatcgttatcggtggcggtcacgcaggtacggaagcggcgcttgctgctgcgcgtatgggacgacagactttgcttttgacccataacattgagactttgggtcagatgagctgtaacccagcaattggtggcattggtaagtcgcacttagttcgtgaaattgatgcgcttggcggtgcaatggctttagctgccgataaaggcggtattcaattccgtattttaaactcgcgtaaaggtgcagcagtacgtgcaacgcgtgctcaggctgaccgtgttcgctataaagctgcgattcgtgagaccttagaaaatcaagcaaatcttgatattttccaacaagcggctgatgacctgattgttgaaggcgatacagttaagggtgttgtgacccaaatgggtatccgctttgatgcaaaaactgttgtgttaactactggtacattcttgggcggtgttattcacgttggtttagagaaatcaagcggcggtcgtgctggtgatcctccttctattgctcttgctcagcgtcttcgtgagttgaaattaccggtaggccgtttaaaaacaggtacacctccacgtattgatgcacgttcagttgatttttctgttatgacaccacaaccaggcgacttcccgtctccggtaatgtcgttcatgggtgatgtgtctatgcacccagaacaagtgaactgctatatcacgcatactaacgaaaaaactcatgacattattcgtggtggcttagaccgttcaccaatgtataccggtgttattgaaggggtaggtccacgttactgtccttcaattgaagataagattcatcgtttctctgataaagactcgcatcaggtattcttagagccagaaggccttgatacacatgagctttatccaaatggtatttcgacttcattaccatttgatgttcagtttgaacttgtgcgctcgattcgcggtatggaaaatgcccatatcttacgtccgggttatgcaatcgaatatgactatttcaacccgcaagctttgaaatttaccctagaaactaaagcaattaacggcttgtattttgcagggcaaattaatggtactaccggttatgaagaagctggtgcccaaggtttacttgcaggcttgaatgctgcacgccgtgcatgggaacaagaagaatggacacctaaacgtgaccaagcttatatgggtgtattggttgacgacttgattaccctaggtacgaaagagccataccgtatgttcacttcacgtgcggaatatcgtttgatgttacgtgaagataatgccgatcaacgtttaacaactattggtcgtgagcttggtttggttgatgatgttcgttgggcagcttattgcgaaaaaatggaagctgttgagcgcgaaacatctcgtctacaacatttatgggcggcacctaacaacccaatgggtaaaaagtttgttgaaatgacaggtgctgatttaagtaaagaatgtagtgcgattgacttgcttaaacgtcctaatattaattttggccaaattgcggaacttacaggttctgaagtatcacagcaagtcggtgagcaaattgaaattgctgttaaatatgaaggttatatcaaccgtcagcatgaagatgtggctcaattaaaacgtcttgaagaaactaaaattcctgctgattttgattatgacgtcgtttcaggtttatctcgcgaaattactcagaagttgaaaacagttcgcccggaaacattagctcaagcgagccgtattcctggtgttaccccagctgctgttcagcttgtaatgatcacgattcgtaaaaataatatgacgaaaaaaacggcttaattatttaagcgtgtaaaaaagcccggttaagactgggcttttttattttctgatcaaaaaatatctggaattttcctaagcatcaaaagagattttgcatcctttttttcttatttcacaagttttaaagcgaaagttatattaaattcacgttcaaacaagagggctttaaacatgacaatgaaatcaattcgctacaatggatatgaaatggcatgccaatgctcatgttcaacatagcgcaaaagaaagagcagatcatttttggtgggggaaaacatattgatctgaaaataaataaaagtataaatgccaatataaaattaagaaaattacaattcaaaatctaaagagaaccatatggttctcttttttatatctactgattatttgctatcaggctcaatttctcgcacagcattgtgtacttgggctggctcaatatgaagcagttttttaccaaaactccgtaaccaccatacgagttgggacgtaaatggaacggtcgccgtaacttcgacaatattttcttcaattggggtaatggtctgatctttacttaactgactttcataaaaagttttagcagtttgctcggtcatggttaaagtaagctgaatagattcagtgggttggttgtaatctactctgaaacctaaagcccctgagtcaatataatggtcaatatcgaaattgacagggtgtaaagcccgactttctaaaactttagcagatttgaatcggtgcaaggcaaatgtttgtacttcagttttatcatggcgcgtacaaattaagtaaatcacagcacctttttggaccaaagcaagaggatttaaaatataagttttatcttcgccttgatttacacgggcccgatagacacactcaatctgtttgtcttgtagtagaccttcataaattgcctgctgagcggcacggtccactacaggtggaataagaggttggcttgctggcacaatacggacacgattaatccactgtcttacattattttgtgtagatagactacgttttgccaaatcgaaccaaggccccatctcatcaagtagactgggtggaagtaaatgtttgagatgttcctcaaccatcataaaagttacagcttgagagcttgtcatatgcggtaagctttgaattggtgcatctgattgccaacgccagccttgaggtacagctttattactttcaattggaaaacgctgagcaatttggtttaaatcacgctgaatagtccttaaactgatttcaataccttcacgctcaagcatttcttgcaattctcgagttccgatccatttaccggtaggaaggcgagatagaatctgccattggcgatataaactatttgaagtttctttttctgttacagacataagcgtaatacatctatatccaattgctttggtgtcaacacaataaaaaaactttacagatttagcaagtttgtcagattcggtttatagcagcttttacaatcaatgctaaaatttagaagaaagttataacaatgatattcaataagcattatagatatataagtggcactgaaattgcttatttaaaaatgaaatatagataaatgataagacgaggttgctatgtcagaacaagagaaagacctacaagccgatattgattattttatacaggaacaggcgaccaacgcattacttaaccaaacttcgtttatagaaaatctttccgtacagtcgaacctatttgaacaactaaaatcgcagttttttaatgagatgttggatgatgcgacgtctaatggtgtggcctctaaaaaaattgaacaatggctgagcattcgtactttggatgagttgaaacaattaaatgcggaggctaagcaacattttctctatcacggcattacatttaacgtatacggtgataaggagggagtggagagaacgataccttttgatctcattccaagggttattgaaaaaaaacagtgggaaaaaatcgcagctggctgtgcacagcgagttaaagcgcttaattattttttagatgacatctatcatggtcaacatattttaaaagagcaattaattccggaaagtcagattatttgtcatgaggcttttcagccccatatgcttaaacacacgctcaaaggcaaaatttattctcaaattagcggaatagatattattcgtgacagtgaaggcgagttttttgtacttgaagataatttaagaacaccatctggcgtatcttatatgattgaatgcaggaatattagtcaacaactcatgcctgagctctgtgctgctaacaatctgcaaggtattgaacactacccaagcttattaaaagaaatacttcaagaaaactctgagattgatcagccttttattgtggtcttaacgccaggacgttttaacagtgcttattatgaacacgcttttttagcacgtgaaatggatgtgccactggtcaccaatcgagatttatttgtagaaaatgatcaagtatttgtaaaaacgattcgcggccgtcaaaaggttgatgtgatttatcgccgtttagatgatgattttttagatccacttgcatttagacctgatagtgctttaggtgtggcaggtttaatgtctgcttatttacagaaaaacgtagtgattgccaatgctcccggcactggagtagctgatgataaatcgatttatccatatgttgatcagatgatccaatattatttgggtgaaacaccaattttgaagaatgtacctacttaccagtgccgtgagaaagaacatctggactatgtactggctcatttagatcaattggtcattaaagaagctcaaggatcgggtggatatggcatgttaattggtcctaaagcaagctcatgtgaaattgatgaatttagacaaaaactgcttgctacaccgcatgaatatattgcccagccaacattggctttatcggttgcaccgactttaactacagcaggggtggctgagcgccacatcgacctacgcccgtttgtactcagttctccttatcggaccgaaattgtgcccggaggtttaacacgagtagccatgcaggcaggttctttagtcgttaactcctcacaaggaggaggtattaaagatacatgggtcgttgaaacgctacattcttaatggttggttaaagaggaaatttatggttttactcaattcgagtgcgcaccacatttattggttgggtcgttatttaatgcgaattcaatttgctgtatcacatttgccatttacagatgatgctaaagcagcccaatttgcagcagcatttgggctagtcattgatcaagcagaattactgaattgctatatgttggatacgaaacaaacatattcattactgaatcagttcgctattgctaaagataatattcaagagttaagaggaatattatcttcaaatgcctatgcagaattaaatcatgcgattaagggagtccaagctcatcctgattcattaaagcaggctttagcgaaatgtaatcaaatacttgatactgaacatgaagatatagcgttatttctgcatttaggacaaaagatagaattatttgatatacgactacgttttcagcaagaccttacacagctcttgcaggagttagaacaattacttcaacagctgaatgacttagggtggaataaattaactcaaccatggcaattattaaaagatcatccaaattgggaagcttattataattttacccagcagttggaatatatgttcgaggcataattatgaaattgatggttaatcatcaaacgcattataactatactgaaactgctaaaaacagtattcagtatatcaagatgatgcctcaaacatcgctgcatcaacatgttatgaattgggcaatcagcgtgcctggtgacaagacgctcaaaagagatatttttaataatatttggataacggctagccagcgttatgagtatcagcaccttacttttatggcacaaggtattgtagagcttctaaatacagaaataggaggagtagatatatctataccaataaatctatttctccaaagtacagaggccactaaatatgatgctgaaatgttggattttgcccagagaattgtaactgtcaaagatcgacaacatattgctttgctcagtgaaaatattttgcaaaagatgccatatcaaccggatagtacatctgttcatacaacggctacgcaagcctttcaggcaggtcagggggtgtgtcaagatcatgcacatgttttaatcgctatgtgccgtgcgttacaattaccagcacgttatgtctctggttatctatttgatcaaaattctccacaccttgccagtcacgcttgggcggaggtatttttagataatcagtggtattgttttgatgtgagcaatcaattgtttacaccaaagcatcatatttatcttgctgttggtcgggactatctcgatgttgcgcccattaggggagtgcgagaaaaaggtggtactgaaaatatgatgtctgtggttcaagtgctggcttgttgaatgtaaagagaacgaaatgacctattgttgtgcgctgagattggaacagggtttggtgtttataagtgacactcgaactaatgccggggtcgatcatatttctgtgttccgtaaactgcatacttttggagtaacgggagagcggtttattgccttgcaaacagcaggcaatttagcaactacacaagcggttatcgggcatttgcaaaatgcacttattttgcaacaagagcctaatttatatagcattaatactatgtttgaggtggctgatctagtcggtaaaaccttgaaaagcgttttagaagatatcagttcagatacccaagaacaaatgaattatgcctgtagtattttagtgggtgggcaaatcaaaggcggagatatgcagctttataatgtttatccgcaaggcaattttatttgtgccaccacagatacgccttactttcaaattggcgaaagtaaatatggcaaacctattttagatcgagctttatattatgcgatgccattagatgatgctcttcgttgtagtttaatttcatttgattctacattgcgttctaatgtctctgttggtttgccgttagatgcattggtttatagtaaagatagttttgtgatccctatgggtaagcgaattactgaagatgatccatatttttcacaaattagtcgtcaatggtcagatacgttacgccgtggtttacaggaaatgccaaaacctacagatgattattggcgctaaaatttattcaaaaaaaatccaagcagtgcttggattttttatttagtgaactttaagtaccctgacggactgggcgagaacttagacggcaaagtaattcatagccgatcgtgccatttgcttcagccacatcatcaactaaacggtgatttccccaaagttcaacttgggtgccaagttttacttgagtatttgtgacatcaatcgcaatcatatccatacttacccggcccacaactgggcaaagtttgccatcaatagcgacaaaattttgcttaacataagctcttggataaccatcaccatagccaatagaaacaatggcgatatccatagcctgttgagcacaaaaagtagagccataacctacgtgttcaccagcttcaatatggtttaacgctattatttctgcagtaaaagtcatgacaggtttcaaatcaagatcatgcactgttttatctgcaaaaggtgaagcgccgtagagcataataccaggacgtacatagtcaaaatttagttctggccatttaaagatggcagctgaattacagcatgatgctaaaattggatcgcaagtttctttaatatgcaaaaattgctgtttttgttgttcatttaaagggtgatctacatctgcatttgcaaaatgcatagcaagtacacatgtaaaaccttcagactttaatgtcttaatcacttcaataatttctgggtctttaaaacctaaacggttcataccgctatttaatttaacccatacttttaagccttgggcaatatatgcttgtttgtgtttaattaaccattcaaactgttgttgatggtgaatgacgcattcaaatttttgttcaattgcgacgggcatttcatcttcagaaaataccccttcaattaaagtaactggttgttcgaaaccgagttcacggatttctaatccttcttgtaggcaggctacaccaaaggcatctgaggcatttaaggctgctaaacagtctttgactccatgtccgtatgcattggcctttaccatgcttacgatttttgaatttgctgcgagttgtttgacacggtttaaattatattgaagcgcttggcgatcaatataaactgttgcttgacgcaccctcatttactcctttgggctagagatagagtttattcttcatcatcatattggctgtaatactcaggagagagattactaaaacgagtatattggccttcaaaggcaaggcgaacggtaccaattggaccattacgctgtttaccgatgataatttctgcggtgcctgcttctttcgattctttgttatagacttcatcacggtaaataaacatgattaagtcggcatcctgctcaatcgcaccagattcacgtaagtcagacattactggacgtttattcggtcggttttccagacttcggttaagctgagatagtgcaatcacaggacagttcatttctttagctaaagcttttaagctacgtgaaatttccgagatctcaccaacacggttgtcacccatgcccggaactttcattaactgtaaatagtcgaccatgatacagccgattttaccatcatgcatttttgcgatacgtctagctcgggcacgaacttcagtaggtggtagggcagaggaatcatcaatatacaaatgcatttgttgaagttgcagaatggtacccgttactttagtccattcatcagcatccaaattacctgaacgtaaatgcccttgatgcactttacccatagctgaaattagacgcatcgcaattgagtctgctggcatctccatagagaagacgagagctgggagtttattgtattgtaaaacactttcaaccaagttcatggcaaaagtagttttacccatagatggacgtgctgcgacaataatcaaatcacccggttgcataccagaagttttattatcgagctctaaaaagccagtcgttaaaccagtaatatttccgtctaattttgaaagttcatcaagtttactaattacatcggcagttacagaactaattgctttaggaccagaatcttttttattgttgttatgttgttctgctaaagagaaaatacttgtttcggctaaatctaaaatttcacttacacctcgaccttttgtgtcataagcattttgtaaaatttcagtacttaccttaatcatactgcgtagtgtagaaaattctttaattttagtcgcataagtttcaagattatagaaactcgaaggtgagtcagccataagctgcatcaaatattcttcaccgccaatcgcatcgagtaagttttgttttaaaagccagtcgttgaccaaaaccgcatcatacggtgagttttcctgtgctaatttttcaattgcacgataaatatatttatgacgagtggcataaaaatcattttctttgagtaagtcactgacttgttcaaaagattcagcaacagtcatcagcgcagcaagtacagcttgctcaatggctaaattgtgtgggggagtgcgaaactctttaagttggcctgattcactcgtcttattttctgttggagatgaaagggttaaagaagtggcattcgcctgagacataattagacctgatgataaaatgtgtacacaaaaagggttttaagccgagaactatcttaaaacaaaactaaataaactacctaattaaaaaaccaattaaactgaagaactgatcaggaattaatatatctaattttattgcttaaatttaagagataaaaaaagagcatgcgtaagcatgctctttttttgatgagaaattactcagatacgatagtaacgagaacttctgcaacaacatcatggtgcaattgaattgcgatgttgaattcaccagtgtgacgaagcgcaccgtttggtaaacgaacttctgcacggtcaactgtaagaccagcattcgttaacgcgtcagcgatgtcacgagtaccgatagaaccgaagagtttaccttcgtcaccagctttagcagtgataacgatgttaacttcgttcaattgttcagcacgtgcttgagcagcagctaatacttcagcttcttgcttctcaagttcagcacgacgagcttcgaaagcagcagtgttagcttcagtagctgcaactgctttaccttgagggataaggaagttacggccgtaaccagctttaactgatactttatcgcctaatttaccaaggttcttaatgcgttgtaataagataacgtccacagatcacctcacttatggttgtcagtgtacggaatcaaagacaagtagcgagcttgtttgatagcaagcgctaattgacgttgataacgagctttagtaccagtgatacggctaggaacaatcttgccgttttcagtgatgtactgttttaaagtatcgatatctttgtagtcgatgtacgcaacattctcagctgtaaagcggcagaacttgcgacgacggtaaaaacgtgccattgatgttctccttattcagcttcttgagcaacttgctgtgcttcttcacgttgagctttacgcgcacgcttttcttcagcactcttagcaagcaatgactcttcagtgattgcgtgttcacgacggatgataaggttacgaatgatcgcgtcgttataacggaataattcttctaactcatcaagcgtagattgaccacattcaacattcataagaatgtagtgcgctttgtgaattttgttaattgggtaagccaattgacgacggccccaatcttctaaacggtgaatttgaccatcagcttctttgatctgagagatatagcgttcaaccatacctacaacttgatcgctttggtctgggtgtaccaaaagtacgatttcgtaatgacgcattgtcagctccttacggtttaaacagcccctaataaaattagaagcaaggagtcatagctaaaaatataaatagctacgtcgcaaaaaatgcgaaggctgaattataggtaaaaattagactaaaaacaaatcttttgatgagaaatataaaagttatttgagagaggaggaaatcctcccttaattaaaagagaggaagatttggagcaggggattgataggtaaagctaaaacttaaacttagcaaagtaattaagattactgagtaaaggaaaaagcgtttagcccaaagttggtcgttttcagctttaaatccaataattgataaataaaaccagtatgcggtcaaagcattaaaggtaatcaagaaaaatacattggtgtagccaaaacaatataacccattcaaaacagctgcaaacaacaggatatagattacacattcaattttcgtgcgataaatggaacgtgctacaggcaagataggaattcccgcatttttgtaatcatcaaaacgataaattgcaattgcccaagagtgaggcatttgccataaagcgtatgctaaaaacaaaagcaaggctgccacatcaaattgatgagttactgctgtataaccaataacaggagggctcgctccggagatactaccaatgacggtttgatggattgaggtacgtttagtccacaaactataaaaaccgacatagacaataaaaccaatcattgcaaacaaaaatgcgtaaccatttacaccaaaccacaaaatgctaaaacccattactccgagtacgaaagcatatacaagcgcaacagtaggagagatggtttttttaacgagtgcacggttttgagtgcgctgcatctttgtatcaatatcttgatctataacattattaaccacacaacctgaagcaacaactaatgttgttccaatgagagtgagcaataataataagatgtctatagagccttgggcggctaagaagaagccgcccaaggtggtaatgaaattaccgaagagaattcctggtttagtcaggaataaatactttttcaacatgacaatcagtttagatcatcatattgtagtgaaggtaattcataatccacacagaaccgattaaaagtacagcgatacataggattgtgtagataaatgcaatcatattccaacgttgttcagatgatgtattcatgtgtaagaaatacacaagttgtacaagaacctgagcaacggcagtgattgcaatcactgtaaccaaaagaccgcggctgaaaccacccgccatcaccatcccgaatgggatgatggtaaggatgacagaaagaataaagccaacagtgtattgcttaaagttaccgtgtgacgcaccagcagcattatgctcatgactactcattagagaactcccagtaagtaaacgacgctgaatacacagatccaaacgatgtcaaggaagtgccagaacaagcttaagcaagcaagacgacgtgtattcggtaaagtcaaacctttagttttgatttgatacatcagtaccaacatccacactaaaccagaagttacgtggataccgtgcgtacctaccaaagtaaagaacgatgataagaaagcactgtgtgttggaccatgaccttcttctacaaggtgatggaattcatagagttccatcccgatgaaggttgcaccaaaaaggaatgtaataaataaccaagtgatcacttgatttacattctttttataagatgcaagtaccgcaaaaccgaaagtcaccgatgaaatcaataaggcaaatgtttcagttaacacgtagcctaatgattcatggaacaggtcatatgcacttggagttcctggtggaacatgactgcttaatacagcgaacgcaatgaagagtgatccgaaaagaatcaagtcactcatcaagtatgtccagaaaccaaagaccgttaagtcagtatcatcatgttcatgatgaccatcatggccgtggttgtcgtgatgaagtacttcagccatttccttagtccttcttcaagtgtttttcaagtaaagcatagcgttcgttttcaatacgctcaacttctgcagctggaacatagtaatcaacattcttagtgaatgagcttacgatcaagctaacaacagctgcaacgaatgaaacaacaacgagccaccaaatatgccagatgagtgcaaagccaagaagagtaatgaacattgcaatgacaaaaccagcagcacggtcagtcggcatgtggatgtcttcatatttagtattacgtgcgtatgctacaccgttttctttgtcagtccagaaacggtcaataccgcttgcatctggttcatgagcaaagttatagaatggagcaggggaagaagtagcccattcaagtgtacgagcatcccatggatcgcctgtgtagtccatgttttggtgacgttgtaagaaaccaacgatgatttgcattaagaaacatgcaataccaatcgcaacaagaacagcaccgaataatgcaatcgcaaggtatgggtcccattcagggttgtcatatgtattcaaacgacgagtcatacccatgaaaccaaggatataaagtggcatgaatgcaaaatagaaaccgaagaaccagaaccagaatgcagctttaccccatgcttcattgagcttccaaccaaacatttttggccagtagtaaatgatgccggcaaacataccaaacaccacaccaccgataattacgttatggaagtgagcgatcaagaataatgagttgtgtacaaggaagtccgcaggtggaacagccataagtacaccagttaaaccaccgataccgaatgttacaaggaagccaagcgtccataacattggagtagtaaaggtgatgcgacctttatacatggtgaataaccaagagaagattttcacaccagtaggaatcgcaataaccatggtcatgataccgaagaacgcgttaacgttcgcaccagcacccatggtgaagaagtggtgaagccatacaacaaatgctaatacagtaattgcaattgttgcatataccatagacttgtaaccgaacaacgctttacgagagaaggttgcaacgatttctgagtataaaccaaatgctggtaataccaagatatatacttcagggtgaccccatgtccagatcaagttcacataaagcattgggctaccgccaagctcatttgtgaagaaatggaaaccgaagtaacggtctaatgtaagcatcgcaagagtacctgttaatacagggaaagatgcaatgattaatacagccgtacaaagtgaagtccatgtgaaaataggcatatccatcaatttcatgccaggcgcacgcattttgatgatggtaacgaagaagttaacaccagataaaagcgtacctagaccagaaacctgaagtgcccagatatagtagtcaacacctacaccaggagaatattgaataccagacagaggagggtaagccatccaaccagtcgcagcaaattcacctaatacaagtgaaagcatcattaaaccagcagcaccagcgaataaccagaagcttaaagagtttaataatgggaaagcaacgtcacgagcaccgatctgtaaaggtacagagatgttcatcatacctacaactagacccattgctacgaagaagatcatgattacaccgtgtgcggtgaagatctggtcgtaatggtcaggatgtaaataaccttcaccaccgcctttagcgaggaaaagttgtaaacgcatcatgatcgcatcggcgaaaccacgcaaaagcatgacgacagatacgatgatatacatgataccaatctttttatggtctacagttgtaaaccattctttccacaaatatccccattttttgaaataggtgataccgccaagcacagcaattgcaccaagtgccataaagaccatggtgacaagtacgattggctctgtcgggatagagtcccaacccaatttaccaaaaatcatatccatgtcttattccccttgagcagcgtgttcagctgcaacatgagtttctgctgttgtatgtgcagcagagtggtcagcaccatgatagttactcatatagtggttgataattgtttcaaacaattttggttcaactgaagagtaataagtcacagggtgtggcttagtcgggaacggtttcatcgcttctgctttagcaagcgcttcttgatcaccagcagctttagcacgatttactaaatgctcgatttggtgcttagaacgatcgccatcacgtaaggttgccaattcagcttggtcaagcgtagttttttgaactgcttctgggttaatagttgtaccattacctgctttaacagccgctacccattcgttgaattgttgctctgtaacgctatgcgctttgaaacgcatttgagagaaaccatagcctgagtagttagaagagaaaccacgatatacaccagtttcatttgctaacaaatgaaggtgagtttgcatacctgccattgcataaatctgaccgcctaactgtggaatgaagaatgagttcatcgtgaagttagaagtgattttgaaacttaacggagttttctctgggaaacgtacttcgttaacagtcgcaatgttttgttcaggataaataaaaatccacttgaactgttcagcaataacctgaatagttaaaggtgctttatctgattctaaaggacggtatgggtcatacttgtgggaaccccaccaagttaaccaagctaaaataccaataataatgacaggaataccccatactacaacttcaattgcagttgagtgtgcccatgtaggtttatagtctgcatctttatttgacgcacgatatttccaaccaaaccataatgccatgatgattgaaggaatcaccacaagtaacattaaatagatcgcagtcatcataaggtcactttgaccttgaccaactggacctttagagtttagaagtaccatatcaccaccacacccagtcaaaagtgcggcaagcgttgataaagacaatacagctaaaatcgtttgtctcattttacaacctcggtgaagagtcccattccctaattaaatatgggatagcgattaaagtgtcgcatgattgagaacgctagtcttaaaaattagacttctcaatgatgtgacaccgctacgttgtagggcattatgcctcatatcgacaaactaagctacacataaagtcgtctgaaataattgttttaaaacccgattttttttgtagggtatctaatttcaacagagcttttatttaaatatcaactctctatggaaaaaaaggaggcgaggtgcctccttttttttagacattaaatgaatgagtcatttactatcatttgatcacttttgttcttgcaattttgtcatgtagagcttgtcgcttttgtcctaatgcaaaagcatagtcaataattgtactaataggcataaatagtaagtttaatataatgaaaacgacacttcttagaaggaagatacgcgttaaattaactttaccattggtttcggcatcgacaattctaattccgacaatttttttaccaatactttgcccaaacttagtcaataaaaatgcttgaatagcgagcattatgacgacataaagtagcattgtatgccaagcttctataggaataagggtaaaaagctgctgttgaagttcagctgctttagttgatgcaacttctgcagattgcatctgtttttgtaactcaaaaagttgtttatattgagcttcattaaagaaaaaagacggaatagctgcaataggtagccaaagtaataagtcaataatttttgcaagagcacgagacgaaattgaagcaagctcgtgtgttttagtttctacacgaatgtgctgaatggtctcattataaggcgtatttgtatttgctgaaaaagcagaataaccagtaggttgatatacaagtttaccttgggttaattctcctaaagctttccattctgtcatgccttcatgccaagctaaatcagtaagcaaaacttgttgacttgccaacatttgatttagttgttctaaggtataaggcccagcttgttgattattacgtgccaagtaaatttgcataagtaaaaattctctattctaaagatgaaaaaagacccacggatgggtctttttttataacaaattagatttgcttgattttttcttcagcaaggaagaaccatgtgtctaaaaccgagtcagggttaagagatactgattcaatgccttgctccattaaccattttgcaaggtctgggtggtctgatggtccttgaccacagataccgacatatttaccagctttacgacaagcatgaattgccattgaaaggagagcttttacagcagcatcacgctcatcgaacaagtgagaaacaataccagagtcacggtcaagaccaagtgttaactgagttaagtcgttagaaccgatagagaagccatcgaagtgttcaaggaattgttcagctaacaatgcattagttggtaattcacacatcatgatgacttttaagccattctcaccacgcttcaagccattttgagctaataactcaatgacgcgttttgcttcagacactgtacgtacgaatgggatcatgatttggatgttagttaaacccatttcatcacgaacttttttaagtgcgcggcattcaagttcgaaacagtcacggaaattgtccgaaacataacggcttgcaccacggaagccaagcattgggttttcttcttctggctcgtataacttaccgccaataagattcgcatattcatttgacttaaagtcagacatacgaacaataactggtttgtcagcaaatgctgctgcaagtgtagcaataccttcaactagtttttcaacatagaattctacaggtgatgcataaccagctgtacgggtcattaccgcagcacgagtttcgcgaggcaagctttcaatgttcagaagagctttagggtgaacaccgatcatacggttaataatgaactctagacgagcaagtccaataccttcgtttggaatttgagcaaagtcaaaggcacggtcagggttacctacattcatcatgattttgaatgaaagtttaggcatagattcgatagagttacgttgaacttcaaaatctaacgcgccttcgtagatgaaaccagtgtcgccttcagcacaagaaacagtaacttcttgaccatcagtcaatacttcagttgcgttaccacaacctacgattgctggtacgccaagttcacgggcaataattgcagcgtgacaagtacggccaccacggttagtaatgatggcagcagcacgtttcattactggttcccaatctgggtcagtcatgtctgatacaagtacgtcaccgtcttgtactttgtccatttctttaattgagttaacaatacggactttaccagaaccaatacgttgaccgattgaacggccttcacaaagtacagtacctttttgcttgagtaggtagcgttccatggtgccgacattttgacggctctttacagtttcaggacgagcttgaacaatatagatttgaccatcatcaccatcttttgcccactcgatatccattggagcgccatagtgcttttcgataataagcgcttgtttcgctaactcttgtaactcgtgatcatttaacgcgaattgttgacgttcttgtttttcaacgtctacaactacaacagatttacccgctgaaccttcttcaccataaatcattttctggtgcttagaaccaaggttacggcgtaataccgcatgtttacctgcatttaataatggtttagaaagatagaattcatccgggttaacggcaccttgtacaaccatttcacctaaaccgtaagatgcagtaataaatacaacatcacggaagccagactcagtatcaagggtaaacattacgcctgcagcgccagtttcagagcgaaccatacgttgaacaccagcagaaagcgcaactagactgtgttcaaaaccttggtgaacgcgatatgcaatagcacggtcattaaataatgatgcaaatacttcttttacagcaattaatacgttatcaataccgcgaatattcaagaaagtttcttgctgaccggcgaacgatgcatccggtaagtcttctgcagtagcagacgaacgaacagcaacagcaatatctgggttaccatttgaaagtgcagcaaatgcttcacgaatttcttgttctaagccaggtgtaagtggagtctctacaatccattgacgaattttagcgccagtttctgctaaggcatttacatcgtcaacgttaagctctgcaagttctgcttgaattcgagcgttaagaccgctttggtctaagaactcacgataggcatcagcagttgttgcaaaaccaccaggtaccgatacaccagcatttgataaatggctgatcatttcacccaaagatgagtttttcccacctacgagttcgacatcgtgtttccctaatttttctagaccgattacgcgcgcttccaaagttttcactccacttttgcagtattaatgtctatcttggcatgaaattaaaaaataaagtgcttagttgagaattttactaagcgacagtcatgtaagatcagtttactataaagattatatagcactaagacaaatgtttaaggagaattttaatgtcagaaagtaaacaatttaagcggagtgtttttttatttctgatggaactgcgattactgccgagacccttggacattcgttattagctcaatttcctaacgtagattttgatattcacatcatgccttatatcaccactgaagaggccgcaatggcagtggtggtcgagattaacaagtgtcagaccagagatggttgcctgccattagtatttgatactttggtcgatccgcatgtgcgagaaattattaatacggctaaagcggttaatctggatgtgtttgaagggttaattagtaagctggaacaggagcttggaaccccgcctacaactttagtcggacagactcatgccgtgaccgattcggagtattacaaagcccggattgatgctgttcattttgcgcttgataatgatgatggagcacgtacccgccattatgacaaagctgatttaattttaattggcgtgtctcgttccggtaaaacaccgacttctatttatctatctttgcaatttggtatccgtgttgctaactatcctttaaccgaagaagatttagacgataatcgtttaccggcagtcttaagagagcaccgcagtaaattatttggtttgatgattgatgcagagcgcttggttgccattcgaagtgaacgtaaagcgaatagccgatatgcaagttttagccagtgtcagatggagttgcgagctattgaaggtatttatatttctgagggaattaaatacttaaatgttaccgaaatgtcgattgaagaaatttctactcgtattttacaaatgacaggtttaaaacgtcgtattggttaattaagtcaattatttattttaaccattcaatttaaaatttattaatatgattaaattgaatggttttaaatataaaacaaattaaaaataaaagttttaaatataaaactgtttatataaaaatgtttttgattggttaatgttaggtatgttttgtgcaaattaaatatattcaaaaagaataattttgaaaagaaatgtatataaaaaaataatctatatttttataaatgtttgtttttaggtggcttttaaaaaaacaaatactttttttctccatatttattatttgtgattaaagttgctagttatttgattattgtgatgtgtgtcacatttttaactatactttcccatctcgatatgggactattcgattctcaaaatgctaaagaaatgtgttttttcattggtctatctcttgccaattcatttatacgctgctcaggttgatgtattgcgtgagcaagctattcaaaattatagagcaggacaaactcaacaagctgtatctcaactagatcaattgctaaataaatacccgcatgatcaaaagctgcttgctgattatctgtttattatgtcaagtgaaaaaagggatcttacaaatttttcacggtttttggtaaatattaattatgtagactttccagaatatgcaaagttacctttaattcaaaatttccgtgattttaagcattttaaaactgcaattgactggtcaaataagttcaatattcaaaagtcagttgatggccgtattttattatcggttttgtatgctgaagctcaagatgtggcgaatgctaaagatcagttgtcgaagatcgatattaaaggtttaactgctgatcagttggtacgggttgcatatgcttatcgtttaataaatttaccagtagatgctttagctacagttgagcatgcttatcaacaacaaacaaaatcttcatccgttttacaagaatatgtttacgatctaattgctattggctcatataaaaaggcacagcaattgctgcaagcgagcgaaaaaactgaacaaacagtgcaaatgttgcagactttacaagttagtgagttttctcaacatatcaacaatgcaattgctcgatataaatatttaaatcgtgaaggactagccgatgccgaaagctttgctgaattagataaagtgctggagcaaggacaaaaaatacatcagcaaatgaatccttccgatcctaattacttacggttttattacgattatttatatggattagattttagagggcgttcaaaagcagttatagagaattccacccagttgaatattccactcgaaaaattaccggcatatgtacgtcatgcaattgctgatagttatttggcggagcaaaaaccgaaaaaggccgagtttgcttataaaacgcttttaaccgaaaagaattatccggatatgaccgtttatacgggactgtattattcttatattgaacaagaaaaatataaggaagctgaacaacttctcgctgaagttgatcggcttattccaacttataaatatagtcaggctaagggtgtagataaaatcagccatcctgatcgtgatgattatattgctttacaaggaatgcatttagcctacgctaatcatctggatcaagctgaaaagcattttcaaaaaaaagtagagcaggcgcctgcgaatgagagcctgattaataatcttgcgcgtgtagaacgttggagagaaaaaccgctagaggcaaaaaaaacactttcccggttaaatggtatagatccgattgctaaagacacccgcattaatgaaatgcaaaatgctcaagctttaggtgatattccgacatggcgaaaaaccactcaaaacttagtgcaatattaccctgatgatagtggggttattaaaagtcgaaaagaattagaagatcgtaatagagccacaatttcacactcaaccacttggggccaaagtaaggccgaaggtcgcgatactgtaagtgagcagaatggtttaaaagaccgtgaaatggaaacgcgtcttaatagcccttggattaatgataattatcgtttattcgcttggcatcaagatcgttatggtgagtaccgttttggcgatgtgcatgaccagcgttatggggtcggagcagaatggcaggcgaaccgtaaggcgttgtcagcaattgtgtcgcaaagtacggatggtggacaagcaggagtccgtcttgattggtcccaatggctaaatgaccattggcagtatcaattgcaatataacagtcaggctgacattcctttacaagcccttgatgcaggggaagatggtcaatcttaccgagctgctgtcacatggcaaaaagatgaatctcgccagattggcgcgagttacagtttaactgatattagtgatggtaacaaacaacaagaattttcaacattttggcgtgaaagactattcgacgcacctcatcatattacttatggcactgttcgaggtttctacggtactaacagccaagatcaaacagcttattttagtccaagttcacattacagcgctgagttgaacttaagtcatgactgggtgacttggcgtgaatatgagcgttcatttaagcagcattttgaagcgggtgtaggcctttataaacaggccgattactctgctaaacctacttactctttgcaatatcaacatcaatggcagctatcccggacatggcagctcaattatggaattggttggcaataccatccttacgatggacatgatgaacaacatacctacggtatttttggatttgaagggcgtttttaatgaataatttattgtcgaaaatgttgggctgtgccttggtctcaacattgttgcctctgcaatttgcatatgcccagatagaaaaagatttaccaaaaaatcatacggtttctttaacctttcatgatgtgagagatggtgtcttaaaagaaggtgatcgggatatttatgcaatccaaacgaaaaatttagcacagttctttgactggttaagtcaatctgactggaaaccaattcgcttaaaagatattgaagaagcacgtaaacaaggtaaggaattacctcataattctattttgttaactttcgatgatggcgctttaagtagttatagccgtgtatttccattacttaagcaatatcagattccggcagtatttgcacttccgaccagttggctaaatgggaatacacaagctggttatgaagcttatgggcaaggaaatctagtcaattggaagcaagtgcgagaaatgcaagcttcgggcttagccgagtttgcaagtcatagtgatgatttgcatcatggagtattggctaatcctcaagggaatgaacagcctgctgcgacttcttacacgtatttaaaatcccaaaagcgttatgaaacggatgtggaatatcaacaacgtattttgcaggacttaaaaaaatcatacgccgttttaaagaaagaagtgggtgttgaacctaaggcaattatttggccttacggtgctgtgaatgagcaattagaaaaattgtctcaagaagccggctttattttttctttcagtttaggacgtgatggaatgaatagggtgagtgactcgacttttaaacgtagtttggtcactaataatcctacagctgagcaattaacagagggtatgatcaatattctcaactttgaagaattagatttatttaagcaacctcgccactttgtgagtatggacttaaaacaattagctgcttcaactaatacacagtcagatgagaaactagggttattgttatccaagctttatagcttaaaaaataacactttgatattgaaacctttagatgatcaagatggtgatgggcagtatgacattgcttatttcccaacaactcaactaagcgtccagcaagatattttgaaccgaactttatggcaggcacaaactcgtgccggacagtcggttattttagagttgcctgtatatcctcaaaaaaataaaccgtttttggtggtagacttagcgaaggatatcgcacgtttcaatagtaatttaagtggtattcaacttaatgctggaaccactttaaattgtgctatgcaaagcacaacaataaaagaaaatgcctgtgctgaccaattaaaacagcttacatatgtgagccagcttactcaaaaggctgtgaagccttatttaaacatgagtaatcaggctcagtttagtttattgcttacacctgattttgaacatattgaaaatttaccaacgcttttaaaaacgctgttatcccaacatgatttagtaaatcttaagttcaatatagtgggtaagcaaaaacagtttaatcacgtattagcaattttaaatacgcttgatgcgaaatataaacagcgcattatgctgactttatcattacccgaaaatagtcagcaaaatgcctggcaagaagtgaaacaaggtcttttcaatattcagcgcataggtattcagaaatttggtattgatggctataccaatgaaaactcaaaaaatgttcatgaatatttatataacccgattagtttaaattcgagttcggtcatgtatcagccctttgcaggtctcgcgactgaggggaaaaagtaatgaaagtattactcgatattttatttgcttttgcctttttatatccgttgttgatggcttggacatggatggtaggaggtctctggtttttctttaaaagggaatatcatgagcagcaactgcctgagccatcaagtgaagggtgcagtattattattccttgctttaatgaagaagctcaggtccgacaaacgattcgttatgcattacaaacaaaatatccgaattttgaagtcattgccgtaaatgacggaagtagtgacagcactgcagaaattcttgatgaactggcagctcaagatgcccgattaagagttgtgcacctggcagaaaaccaaggtaaggccgtagctttaagatcgggagtgttagtaagtaaatacgaatatctagtttgtattgacggagacgctttattacatcctcatgcagtactttggcttatgcagccttttttaaattttccaagaattggtgctgtaactggtaatcctagaattttaaatcgctcaagtattttaggtaaattacaagttggcgagttctcttcaattattggcttgattaagcgcgcacaaagaacatatggccgtatttttacagtatcaggcgtaattgcagcttttagaaagacagctttggttcgcgtgggcttttggtctgatgacaagattacggaagatattgatatctcttggaagctccaaatggaccattgggatattcaatatattcctcaagcactttgttatatctatatgccggaaacctttaaaggcctttggaaacagcgtttacgctgggcacaaggtggggtagaggtattattagaatatattcctaaaatgttcaaactccgcttgcgccgtatgtggccggtaatgctcgaagcgttagtcagtattatttggtcatatgtgatgattatgatttttattctattttttgtgggattgtttgtggatttaccgcaacaatttcaaattaattcactcatgccgcagtggtatggcgtgatattaggtggaacatgtcttgtccaatttctagtaagtttatggatagaccatcgttatgatcgtggtcggctttttagaaattatttttgggtaatttggtatccattatttttctggttactgacgttatttaccagtgttgttgcagtacccaaaacaatatttaacaccaaaaaacgtgctcgttgggtaagccctgatcgaggcttccgtggagatcactcatgaaaaatgatgcaaatatcgacgtagaagttttagatatacctgaatatattgatcagcctgaatatgtgaaaaataaaactgcaaactataccttacaaacaataggttggttttgtttaatgtggctgctttttccactcgtttcattatttttatggatttttgaagggcacctcatttatgactatgtgtgggtagatcatgtttcagaagtgaaaactttattgcatttacttctgttaataggtctgagcgcactcattttaattttatgggcaagttataactggcttagatttcatggagatgatcgtcgcagcaaggccccgaatagctctgttgagttgctggcctcacaatttatggtcagtaccgaatcattatcagaattacaaaagtcccagcgcatcatcttacattatgatgagcaggggtatttaactcgatatgatttgaaatgagtgagaaaaaaagcatggtctatcaacctatttttaaggtgtggttctaataatgatatcaacaggtcgttgagtgccatccatactataaatggctgtatcggtaacttttacaatcggccaagtttgtagtttgcaatttgctctttgcagtgcagtatagtagctatccgatttaaaaaatgttttatttgcccgtgcggtattgggcgtcaaaagtcgtttaagccatgtttcatttacttgggtttcaagaaaacgtaaagctaagatgcttttaacacgattgttaaataacctccggttcttggcaataagtggatgggtaattaatcgatgtataccgatttgactgtgaggtaaaataaagtgaggcgtaatttgaaatacagttacaaattttgcctgttggcagattttttctaaatgcgttacggtctcctgatccgttccaataatggctacatttaaatgagaaaaatcaaattctttaagttgatttgatgacagaatttgaccagtgaaggcttcaaaatcctcaactgtattttgaaaaatagctgatttagcgacattatttttaaggtcaatactcattttccaaaagtccttttggttttcatttatgatgatttttatcgttttaatataaataaccaagcaaggagtctgggtaaagtattttcagataggtggttatctcatgcttgatatagattcaaacatgagatgtcgcgtatatattaattacctgattttacttgcattaattgggtgaaactatctaagcgtttaactgtgtcgtatacatcacaagtaaaaataaactcatcgacttcataagtgtccagaagtttttgcagacccgaacgtactgtttcaactgaaccgatttgtgccatcgtatagaagttttcaacagaaagttgttctgccgtgttccataatccctgcatagatgtaactggtggcttaagtttgaggctttccccacgaattaatcctaatacacgttgataagcacttgttgccaagaactgtgcctcttcatctgtatcagcaacgacaactggaacacccattgaaacgtaaggtttatctagatattcagaaggttcgaaattctcacgataaagttcaatggcttgaccaagcatacgtggtgcaaaatgtgatgcgaatgagtagggtaagccaagttttgcagccaactgggcactaaataagcttgaacctaacaaccagacaggtacatgagtattttgtccaggtgtcgcaataatcttttggcccacttgaggtgctttgaaatattgcaagatttctacaacatctctcgggaactgatcttctgtttcctgatgtccacggcgtaaggcacgcatagtgacttgatctgtacctggagcgcgacctaaacctaactcaatacggtctggatataaagtagctaatgtaccgaattgttctgcaaccactaagggagcatggtttggcagcatgatcccgcctgaacctaaacgaatgcgctgggtatgagccgcgataaaaccaagtaaaacagctgttgccgaactcgcaattccatccatattatgatgttcagcaagccaaaaacggtcataacctaacttttctgcatgttgggcaagctctagtgcatgacgtaatgaaaactcaatagttttatcatcacgtataggggcaagctccaaaattgaaaatttagtatcttgaagtgatcgcatgcgatattctcggaaaacgttatatcgaaataatacgatataaagaagctgttgtatatcgttttttttcgatatggctttcttcctaaaataaaaaagcaccactagggtgcttttttagattgatatataaattaacgatgtttgtaccaaccacggtgtaaaccgttgtcatgacggtagttaccacctctgtaatagcggcgatcaccatcataatatctacggtcatcacgatcataacgacggtcataacggtcatcatagttacgatcttgggcaactttacgacctagagcagaaccaccagcggcaccaactgctgcaccgatatatccgccatttgtaccgcccatgtttttaccaacggtgtaacccgcgccaccgcctaaagcaccaccaatagccgcttctgtacggttacgacggtcgcttgctgcagcagcaccaccagcaccacctaaagctgcaccaattgttgcacctgatgtaccgccgatacttttaccgattgctgttcctactacactacctagagcagaagttgccgctacacgggtaccattatctgcatgagcaactgtaaccatagatgttgttgcgattaatgcacttgctaaccaaacattcattttcattgtggaactccatgctcttttcaataacgagcaatctttatgtcttgagctaaatgtaattaaaaatttcgagaaaattatgaagaaggcacatgctgatacgatagttttgtgtctgctttgtattgtttctattaatatatggataaactatgaacaactatcctagaaaccaaaatttttagttataaaaaacacccgaaggtgtttttaagctgatttcatcacggtaattagtgacgatgatgacggtgttttttcttccaatacttagaagaacggtctgcatcacggtctttagaaattttattacctaaagcagaaccacctgctgcacctaaagcagcaccgatgtaaccaccgtttgtaccacccatgcttttaccaacagtataacctgcaccgccacctaaaccaccgccaattgcagattctgtacggtgacgacggtcacttgcaactgctgcaccaccagcaccacctaaagcagcaccaattgttgcaccagatgtaccacccatgcttttaccaattgcagtaccagcgatactacctaaagcagaagctgctgctacatgagttgtgttgtcagcatgtgctacagttaccatagaagtagctaaaacagcactacataataaagcatttaatttcatcatttactccgtgtcccaagttacaggaccttaatatcttttgttacggcaaatgtaacaaaacacttctctttaaatgtggagaaccttcattcgattattggagtttagtgtcttctttgtatgctttctattaaaatagaatatttactattcacttagaaaaattaaataccatttatatatattcagtttagctagtcatcatttgaacataagaaatcaattaaagctcgggtagcagaggacatgtgtttatgctgcgcatataacaaagaaaaaggacgtgtatgacctgcatatgtattaagtataggttgtagttttccttgttgaattttttcattaacaataaagtcataactttgacatatacctagcccgctttcagcaagagttaccacacccacaatatcctcttttactaaaattcgatttgttggtatccattgaatttcctcattatcattttttaaaaaccatggggttattttgccgctactgggcaattcaaaggcaatacattgatgatgttttaattcttccaaattttttggaatacccatgcgtttcaaataagcaggtgaggcaacaagttttaaaggtgcttgctctaaaggtctagcaatgagggtgctgttaggaagttgtccttgacggatggctaaatcaaaaccctcagcaattaagtcaacgtttcgattagaaatactaatttcaatttgaatgtccggatatttcaaaagaaatttttctaataaggggggtagacgatagtgcccataagtcgtaggtacacttaatttaatttttccagaaatttgtagctgttcaccttgaaccacgcgttcagcatggtcaattaactgaaaagcatgttgcattttttcatagtaaagctgacctgcttcggtcagacttaaatggcgagtagttcttctaaaaaactggatacctaattttttctcgagtcttgtaattgttctactaatgaccgaaggcgttgtagataaatcaattgcagctgcactaatagaaagcttttcagccacaattaaaaagacttcaacatcggcaagatggtcaaattggcgagacattttgtcctcaaacgcaaaaaagatttgtgaaatgagttgtttttctacttctggggtaaaaatagaatatatccatcccagttataaatccagcaaatgcttggaatgaaggtcgaataatgaagaagttaaatcaaataatgtttgcaatgattgcagcttcggcagcattaagtgcaaatgccgctcatgtattggttgtattgtctgatgaaggacagttagagctaaagaataagcaggtttttaaaacgggtttttatcttaatgagttaatgcagcctacaaaaatgcttttagatgcagggcataccgtaacatttgccactccaaaggggaaagctccaacgttagatgagtcatcaaataatgcaatgtattttaatcaagatgaaaaagcattaaagcagtatgctggtttattacatgatctaaagttaacttctgctcaagattctcctgttgtaagtctggcgcgtattgagcaaattggtatagatcaatttgatgctatttatattccgggcggacacgcgcctatgcaagacctattaaaagataaacagcttggaaaagtacttacagctttccataaagctggaaaacctactgcattggtttgtcatggtcctatagccctgatgtcaactttacctcatgctgcggaagccgttaagcaacttgaacaaggtaaaaaagttaaaactggagaatggatttataaaaattatcagatgacagtaattagcaatcaagaagaagagcaagcgaagagcttattaaaaggcggtgagatgaagttctatccacaaactgcattagagtcacttggagcaaaatatcaaagtaatacgaaagcttggtcgccaaatgtagtggtggatcgtgaacttattactggacaaaatccagcttcggctgttcttgtcggtaaatctttattagaaaaattaaaataactatagcggttaaagaggctttataaataaagtctcttttatcatatggatttggaaagttaacgttttaaaggattacatatgttatttaatcggcataaactgtaaactatgcgctatttttatgatttggcttatcttcttatatttatctagataagttttttggacttttgagatatttcctcttatgaaagcgtcactccgtttacgtcttgatcaactctgtgatcgtcatgaagaacttactgcattgcttgcagatgcagaagtgatttccgataacaaacgtttccgtaaactgtctcgtgaacatagtgatttaactgaaattaccgaagtttggggcaaataccgtcaagcagaagaagatattgaaactgctgaaatgatgaagtcggaccctgactttaaagatatggcagaagaagaaattcaagcaaataaagcattgcttgaagaattagaaagccagcttaatattttgatgattccaaaagatccaaatgactctaatgctgcatatttagaaattcgtgccgggacgggcggtgatgaagctgcaattttctcaggcgatttattccgtatgtatagcaaatatgccgaatcgcaaggttggcgtattgaagtcctttctgaaaatgaaggcgagcatggtggttttaaagaagtcatttgccgtgtagatggcgatggtgtgtatggccgcttaaagtttgaaagtggcgcgcatcgtgtacaacgtgtaccagcaactgaatcacaaggtcgtgtgcatacgtcagcttgtacagtagcaatcttgcctgaaattgacgttgatactaacgttgaaattaacccggcagatttgcgtattgatacttaccgtgcttcgggtgcgggtggtcagcatattaacaaaaccgattcggcagtgcgtattactcacattccaaccggtacagtcgttgagtgccaagaagaacgttcacagcataaaaacaaagctaaggcgatggcattgttagtatcacgtcttgaaaatgctaaacgtgcagcagccgatgcggcaacttctgaaatgcgccgtgatttggtcggttctggtgaccgctctgaacgtatccgtacttataactacccgcaaggacgtatgacggatcaccgtattaacctaactttatataagttggatgccattatggaaggtgatctaacggaattgctcgatagtttacatcgtgaatatcaggcagatcagcttgcgatgcttgcacaggaaaatggcggctaatgaatattgctcaagcgcttgcaattcgtggtgagcctgacagttatgaacgacaggaaaatgcttggttacttgagcattttctaaaaatcaattcactcgaattaaagttcagacttgagcaagagttaacagtccaacaagagcaagactacttggctggtcttgaacgtatccaaaatggtgaacctttagcctatgtgacaggttcgcagccattttggacgctcgatttaaaagtaacgtcagatactttagtgccacgaccagatacggaagttttggtcgaaactgttttaaatctaaatttgccaaagaatgcaaatatcgtggatttgggaacgggaacaggtgcaattgcgcttgcattagcgagtgaacgtccagactggttcgtcacagcaactgatatttacgcacctactttagacgttgcaaaagaaaatgcacaaacacatggcttgcatcatgtgaaatttgcttgtggcgcttggtttgaagcactagaaccccaacaatttgatttaattgtttctaatccgccttacattgaccctgaagatgaacacatgcaagctttggcaacagagccgcgtcgtgcgttggttgcagaccatcatgggttagccgatattgaaattattattgctcaaggcaagaactggttaaaaccgcaaggctggattgcactagagcatggttacgatcagggacaagctgtgcgaaatgtatttgctgagcatggttttagtgagataaaaactattcaagactatggccaaaatgatcgagtcactttggcatgttggatttaaagttatttttgtagcgtatcacgccaacgtaacaaccaattttctataagtttcattaaggtatcggttattttacccaatagcgccaataaaataattgcaatgataacaatatctggtcgagacgtttctcggccatcactgagtaaatagccaatcccttgtgtggccgcaatcagttcagctgcaatcataaacatccacgataagcttaagctgttacgtaaacccgttaaaatgcccggagaggctgctggtaaaataatagatataattcgctgaaaagcattaagccgataaacttttccaacttcaatgagctttttatctacattatgaatcgctgcaactgtattggtgtaggttggaaaaaatgctccaattgcaataagcgtaattttcgaaccttcgtcaattcctaaccaaagcaataacagtggaatccaagcaagacttgggatcgatttaattgctgaaaaagttggttctaaatatgcttctgcctctttacttaatccaacccaaatcgcaaaaattaaacctaaaccactccctataataaagccgaatagaacacgccacgtactaatataaatatgggcaaataggtcgctatgagctaaatctaaaaaagattgccataaactagatggtgcggggagtagataagcatcgatatagccatttctgactaaaaactcgcaagccgctaaaaaaataagtggaatgagtagcgctttaaaccaccgtgtaaatttgtggtttaaatgctttttctgtgattttaaagcctgctgagctaagaagtgatttagttcagctttgttaagtgaatcactcatatactatttcacgactttttgagcaaaacgtggatctaataactgatcaaccacttggttgacattggtgccttttctaaccaagtcttcttcagtcaaaattttcccagaacgttttagtgcttgtgcttgagttgctgttggaatactttgatcaaagttggttcggctcaattgtagtttagccacgggtagaggaagtttcgattcttgagctaaaagtgctgccactttatctggattggcttttgcccattttcgggcttgttcgtaggctttaataactgcttcaaccgcttcagggctttgctttgcaaagtcttctttcacgctaagcacgctataactattaaatgctacattacgataaagcaatttggcacccgattgaatttgagctgaagccattaagggatcaagccccgcccaagcatctacttggccacgttctaatgcggttttgccatctggatgttgtaaatggaccagttgtacatcgcgtttacttaagcctactgtttctagtgattgtagtgtaaataagaaaggatcggttccttttgtagctgcaattttcttaccttttaaatcttttagacttttaatgggtgagttttttgcgacaacgagggcggtccattccggttggctttgtacataaacagttttaattggactaccattcgctcgacttaatacagcagctaatccagcagtagaagcaaaatcgatactattactgttgagatattctaatgagcggttactgccttggctgaaaacccatttaatttgggtatttggtagtgctttttcgagaagtttttgatcttttaccaccagactggttggtgcgtagtaggcgtaatcaagtttaagtgtagtcggaattgcggcaaaagtagatgaagcaaatacaaaccccaatgttgatgccaacaaagtctttggtagagaaaattttgattttaaagacatgataaaaataaaaccgaaatgaaataatagatcatcctttcatgtgtttagaggcttacaaacttagttattttgatttgtaaatcagtttgaaagataaaagtttggataaaattgtaaatctctgtttttatagtaattattaattttttaaataatgcatttatctgaaatattgaatttaaaagacataaatatcataagcttaagccctaatgccttaaacttcattcgatgtatatgttattgcttgaatgtagttaagttatctcgataagcgccggggctaacacctgtccattttttaaaagcacggtgaaatgcactcgggtcatggaaatttaagtcttcactaatatcttgtattgaatcattgcttttgcttaaacgttcaattgcaatatcacagcgaatttcatttttaatttgttgataactcactccttcatgtttaagtcggcgttgaacggtagcttctgaaatattgagctgctgtgcgacatctttgagttcaggccattcggctgggtgaagtttcaataaatgacgccgaataacaacacttaatgcattttcatttttaaagcgaactaaaagattttgtggagtttgctctaaaaaatcgtaaagcgcttttttatcttttttaacttttatatctaaatagtgcgcatcaaattcaatctgatttatctcggcattaaagtctatatcttcacaaaagcgtaccaaataatcttgaatatcgttcggttttggacaacgtaccgcaatactgtttaaactaattctttgatcaactaaccaacacataagcccatgtaccaacattaaaaaggttgcgtaggtaaacatacgtttgggttgttcttgatcatgaatcaccaaataagctttttcttgttctcgaatgagttctcctcgtatatcgtcaagcacaaaattaaaaaacttcaaaatatcgtagagtgctttttctaaagtttcagccgtactgacgagttttgtaagtaatttataactaccacggcgcatagggtgactatccatgccaaaaaactcgtcatccatggcattggcaagttctatccataattgtgcatacgttgctaccggaacacgcgctttaggtgtcataagtaattcagcaggaatgccagctttattcaaaataatttgagtatttagccctttggcataagccacacttaatgcttcatttaccagtgcaatcgaaattgttcctttacttaaagaagattgggcaaccatgtcaaagactcatttttttacgtatttcaagtgaaatatttcatgttcaaaatttggattgatcaaaagctgcaagcattttgaggttttttgaaattgtatcggaaaaaaacaacttttactctcactactaagcttaaagaacatttctataggacgttacataatgaaaattcaaggaaaacattttgtgattacaggtggtggctctggcttaggggctgcaactgctgagtatttggtaaagcagggtgcctcagtcacattagtagacatgaatgtagaagcaggtgagcagcaggcgaaacaactaggatcaaaagctgactttgtaaaacttgatgtaaccgatgaagcagctgctgaacagttctttaaagatgtgttggttaaacatggtcatttgcatggtttggttaattgtgccggtattggcccttctgcaaaagtagttggccgtgagggcgttcatgatttggggttatttgcaaaaactttaaatattaatgtcacaggtacatttaacatgctgcgttttgcagcagatgcaatgagtaaaaacacggttgaagaaggtgaagaggaccgtggtgtcattgtgaacactgcttctgttgcggcatttgacggtcaaattggacaggcagcttattctgcatcaaaaggcgctattgtggcgatgactttgccgattgctcgtgagctagcgcgacatgccattcgtattatgaccattgcaccgggaattatggaaactccaatgcttaagggtatgccacaaaatgtacaagatgctttggggcaaatggtgccgtacccatctcgtttaggaaaaccagaagagtttgctcgtttggttgcccatattgctgaaaactcttacttaaatggtgaagtcatccgtctagatggtgcaattcgcatggcagcaaaataataaaataaggatgttgaaatgattctaaatgctgaacaaagtatggttcaggagatgatgcgtaattatgcgcaaaatcagttaaaaccaactgctgcacatcgcgataagacccatgaatttccggctcaggaattaaaagacttaggcgccctaggcgctatggggatgactgtgcccgatgaatggggcggtgccggaatggattatgtatctttggtactcgcaattgaggaaattgccgcaggcgatggtgctatttcgacaatcgtaagcgtacaaaactctttgatttgcggtattacactggcatacggttcagagcagcaaaaacaaacctatttgccaaaatttgcctctggcgaatggctaggatgcttttgtttaactgagccacatgtcggttccgatgcgagcgcgattttatgtaaagccgagcgagatggcgaccattgggttctcaatggcgtaaagcaatttattaccagtggtaaaaatgctcaagtggctttggtatttgcggttacagataaacaagctggcaaaaaagggatttcgtgttttcttgtacccacgaatacacaaggctacttggtgactcgtattgaagacaaaatgggtcaacatgcttcggacaccgcaaccattacgttagaggactgccgaattcctttagaaaatttggtagggcaagagggtgagggttataaaattgcgttatctaatttagcggctggacgtattggtattgccgctcagtctgttggtatggcaagagcggcttttgatgcagccgtgcaatatgcaaacgagcgtaaagccttcggtgtagagctggttcagcatcaggcggttggttttcgcttagccgatatggcaactcagattgaagcggcgcatcagctagtattgcatgctgcaactttaaaagatgcgggactaccttgtttaaaagaggcctcaatggcgaaactctttgcatcaactatggctgagcgagtatgttcggatgcaatccagattcatggcggttatggatacgtcagtgatttccctgttgagagaatttatcgtgatgttcgtgtaagccagatttatgaaggtgcttctgatattcagcgcttggtgattgctcgtgaagtggctcaagtttagatcataaagtattgaggttttaaacttaaaactgcaagaagccgcataccatgtgcggtttcttgcaattgaaatgatgcatttttgctattagttttgtttgaaatagatggaaaagttgaagaaattttcttcgagctttagctaaaacaataacagtcaggacagattttgtggccttacacaaaatcaatcatcaaacggaatgaaggtgagcatcatgaaaactttggcagaagcttatcagcaatttgatcttacaaggctcatcgaagagcaacttgttgggcatccccaagcaataaatgcttatgttgagtgctgtgagcgttatgtaggaaaatataaaacagcgcttatctgggaagggaaaaacggacaggcagagcactatacgttcgaacaacttgctgaactttctggaaaacttgctaacttctttaaagcacaaggaattcaagctggagattgtattgcaggacttctaccaagaacgcctgagttattaattacaattttggcaacgtggcgtataggtgctatttatcagcctttatttactgcctttgaagcaaaatcgattgatcaccgaattacgactgctcaaactaaattgattgtgaccaatgatgaacagcgccctaaactgaataccttgaatgttccggttattgtaactgttcatcaaacaggtcttttatctgagcatgactttgatttttggcaatctttacaacgatattctgagcaatgtgagccagtaaatcgtagctttgatgatgactttttaatgatgtttacctcaggcacaactggacttgcgaagtctgtacctgttccactaaaagcaattttagcatttaaaggttatatgacccatgccgttgatttgcgtgaagaggatatgttctggaatctggcagatccgggctgggcatatggtttgtattatggcattaccgggcctttaagcttgggtcatggcattattatggatgagcgttcatttaatgtagatcaggcaatagaattaattaaaaaatataaagtaagtaatttaacaggatcgcctacagcatttcgcatgttctttggatttaaggaaaaatttgacccttcaattaaacaacatttacgcgtagtgagcagtgcaggtgagccattaactcctgaggttgtgaactggtttaagcaggatttagaggtcaatatttttgatcaatatggccaaactgagctagggatggtgattgcaaatcatcatgctcttgagcatccattaaaagtaggttcagctggttttgcaattcctggacatcgttttgcggtgttagaccaaaattatcaagaattgccaactggtggtgttggtattttggcaatggactcggagcaatctccattgatgtggtttaaaggttatggtggcaataatcgcaaagcctttgttggcaaatattatttaactggtgacacggtcactttaaacgaacatgggggcattgattttgtgggacgtgctgacaatgtcattacaacttcgggctatagagttggaccatttgatgttgaaagtactttgttagagtgtgaggcggtattagagtcagcagtaattggtaagccagatccggaacgaaccgaaatagtcaaagcttttgtggtacttaagcctgcttatcaagcgtgtgaaacattaaaagataagttacagcaatatgttcgtaaccgtttatctcgtcatgcttatccaaaagagattgagtttgtggacagtctaccgaaaaccacgagcggaaaaattcaaagaggactgttgaagcagcaagaaattgcaaaaatgcagcaagcctacgcaagctaatttgaacaaagggaaatatttagaatttccctttattctttatattaaagatcggctttcacttcctcgccaattaaataaaatgtgccaccagcaatatagtgcaggctacgaagttcttttggtacatgttgaaaatgccaatgcccatctctaaaaacgcggctatctgcccatgcacctacaacagaaccaataaataggtcatgagctgactgattatgtggttcaggaataagtttacataccagccatgcgatacaacctgatacaagcggactggtcagatctttttgataaaacagctcaaccccgcagtgttcaagtttttgtgggtcatctaatttgctaatggtaccaagttgcttggtcatattgagctgtgcatagcaaggaacttgtagtgtgaaataaccactttgctcaaccagctgtcgggttttagtacttttatctaaaacgaccgtcactttggcaggtttaaactctaaggcacatgcccatgcggcagccatcacgttacggtcatcaccatgctgagcagagactagtacagttggaccatgatttaacaaacgataagctttttctaactctacaggtgcaatatatgattgggacatatttagcctaagtaatacagaaaacagatagctttattgttgcagaaagtgtgagagaagtaatgtgatagggtattaactgaataaaaaagttgtttccattttatagctttcctaatgacgaacttagtcataaaatcacttggcttctaagtgaaaggattaacgtgtgaccgagcttcaagatatcgattttgtagagttaagtgatgaagaaatgcatctctatagccgtcagattttacttgatggatgggatattgaagctcaggaaaaacttaaactggccaatgtattgattgtcggtgctggcggaataggctgtagtagcgcggaactacttgcacgagcaggagtcgggaaaattaccctcattgatgcagataccattgagataagtaatttacaacgacaaatcgcatttggtcatgaagatattggacgttataaagctgaagttttagctaaacggttacagaaaattaacccttatatctgtgttgaatactttaatgaacgtttagacggacataacattgataaactagttgaacatcaagacgtcgttttagatggctgtgataactttacaacgcgttatttagtgaatgcagcttgtaaaaagcatcaggtcgcattaattagcgcttctgcaattggttttcaggcgcaaatgtttatggttgaaggtgattcagcttgttatgaatgtttgttcccgaaagaacaacatgccaatgaagggctgcgatgtgcggaatctggtgtgcttgcgactacacctgtaatgattgcgtcattacaagcacatcacactttattgtatttaggactaaacagaacgccgctaaaacaaaaactgttactttgggatgggttaaatatgacgcaacgcattgttagttttgataaagacataaattgtccactttgtcaggcaagctaatcagcaaataaaccaaaatttgctacacttgatttgaatattctggttttaaagaaatatgaaaaaaaatattttatttgatggattgcgctccgttgcccgcatcggtgaaaccgcagtagttgcggctaaagccggtattaagtatgcaactgataagccaagtaatgccaaactcatgcgtgagacttttgagtcgcttggttcaacatatattaaacttggtcagtttatcgcgagtaccccatcgctattcccacgtgagtatgtagaagaattccaaggctgtttagaccagaccccaactttaccttttagctatattcaaggtgtacttgcgtctgagtttgaagggcgtgatttaagccagatttttagttatatcgatgaaacaccactagcttctgcctcaattgctcaggttcatgcggctaaactaactactggtgaagatgtcgttattaaagtacaaaaaccgggcgttgaaaccattttgtacactgacctaaatgtggtgcattgggctgctaaattacttgaacgtgcggtacctaaaattaaatttgccgctctttctgaaattgttgatgaaattaaaacccgtatggtgcgtgaagtcgatttcattgaagaagcacaaaatttagatgactttgtggaatatttaaatatttcccaaaatcaagctgctactgcacctaaagtttatcatcagttttctacgcgccgtgttttgaccatgcagcgtttatatggggtccctttgacagactttagcgtggttaaacaatatgctaaagatccatcgcaagtactcattactgccatgaacacatggtttggtagcttaatgttatgtaagagcttccatgcggacttacatgctggaaatctaatgctgcttgaagatggccgaattggttttattgatttcggtattgtagggcagttaaaaccggaagtttggacagcatgcattgcatttatggatgctttacaaaaaactgattatcaggcaatggctgaaaacatgctcaaaatgggtatgacccataataaaattgacgttcaggttttagcacaagatctagagcgtttatttaatggtgtgttaatggctgatccacagcagattttggcttctaatccagccgatttaaacgacatcatgatggatatggtggctgttggtgagcgtcatggtattaaattccctcgagattttgccttattatttaagcaaatgctttatttcgatcgttttatgcgcgtactcgcaccttatactgatatttatgcagaccaacgtttgaaaatggttcaaaatatggaacctgcttcgttgttaaagcactaaggtcagtttaaatttatggatgccattattattgaaggcttgaaggttgagacagtgattggctgtttcaactgggaaagacaaatcattcaacctttaatgttggatttaaccatccataatgatttgagccgagctgcagcgtctgacaagcttgaggacacactcaactatgcccagatttgtgagttatcggctcaaaccattcagaaagccaagcctgaattaattgagcatgcagcacatctcgttctgcaatgtctgtttgaaacctttccaacaattgaaaaaattaccataaccatccgtaagccagccatcattgcagaagcaaatgctgtaggaattcgtcttgaacgcaccagaaataatttttgcgctcgctctagcgagtaatttagacgcagcacaacactttacttttgcttatacgcaattagcaactttggggaaagtgcagttttcatctgtttatcaaattccatgccgagatggtattggagatgattactggaactcagcgtgtctattaaaaagcaccttatcatctgaacaaattgaatcttttttaaagaaacttgagtcagattctgggcgtgttcgaccatcacatcatatttctttagatgtagatttgattgcatggggaagtgatctggaccatatgcaatttaattctaaaaaattgccgttagcactcgatgtaaaaattcctttatatgaactttgggattgtgaaaccttaaaggctgatagcacactttatccagtcgttaattttaaagtttaatgcctttcaaactaaattttacgcaaactttacgcgggttttgacttcttcaatagagaatttacgggcattttatcgatactgaaattcactaaattagtgttatttcaggacaataaagatgcttataaattctcaaatgcgcatcttgcatcagtctggcattgtcttatgccgactaaaaacaaatgatatctcttcatctctccttatttccaatttggcaaatcaagccaaggggtatagaggagaatagccatgttagaacttatccttgttttatttattgctatttttttagcatggtgcctcgctaaatatctatccaaagtgatgacaaatcagccgatggttggagatggattatttcgttggattgaaaatcctgtttatcgcttgttaggtatatctccacaacaacaaatgaattggaaacaatattctctagcatttgttgtgagctgtgtttttctagctgtggccgtttttgctatttttatgacacaagcatggctaccattaaatccaaatcatgcaccaaatatgagttgggatttagcattacacacggttatttcatttttaactaataccaatcaacagcattattctggacaagctcaattatcttatttgtcgcaaatgacaggtattgtaggtttgcaagtcattactccaatgatggggctggctttagttgtcgcgaccttaagagctttcttttatcagcgcccaagccatattgcagccgatgttgccgagcagccagaccaaattttaattgggaactattgggcagatgtaattcgccctacagtccgattcttacttccgctctgttttgtctggtctttattgctcaatagccaaggcgtaccagcgactttccgagggggaccagaagtacagctgattgataaagccaatacagttcaaacccaaaaaattcctttaggaccagttgcaccaatggtagcgattaagcaattggggagtaatggtggtggttggtatggtccaaatagtagtgtgcctttagaaaatccgacaccactttctaatttattagaaatgattgcgatattacttattccacttaccgtgatttttatggttgggcattttacccagcgtaaaaagtttgcttactttgtgtttggtagcatgcttttcatatcgattatttcaggtgcggcggctgtctggtctgagagtatgtcatcgacagcatctcaacttgccgtaatggaaggtaaagaacaacgttttggaccagccgcatcagcagtttgggcagcgatcactacgcaggtgaataacggttcggtcaatatgatgcatgattcttctgcgccgcttaccggtttagtcgaactcattaacatgctgattaatgctatttggggtggtgtgggctgtggtctgcaacagtttatgatttatctgttactcgcagtatttattgcaggtttaatgacaggtcgtacccctgaattgtttggacgcaagattgaagcggcagaaattaagttgctcgcgattattatcttgattcaacctttagtcattcttgcgtttactgcattaagcctcagcattccaagcatatctggaattagtaatccaggaccacacggtattagccaagtgttctatgaatatgtttctgcgtttgctaataacggttcaggttttgaaggtcttggagacaacactgtatggtggaatgtcacttgtagtatcgctctactgttaggacgttttccgaccttaattttgccattaatgattgccacacgtttagcagcaaaaagaaaagcacccgaaacatcaggtagtcttcaggttgaaacaccaacctttgccttaacgctgattacgatagttgtgttgcttaccttattacaatttatgccagttcttgtccttgggcctattgccgatcaacttttgttggttaaaggctaaggaggcgagtgaaaatgaatacacaaactcatgtaaatagccataaacaaaccatggcagtgccaaattttgaagtttggaaaaatgcatttgtgaaactgctaccacagcatgcaattaaaaaccctgtgatggcaattgtatggcttggaacagtggttacaggcattagtacaatcttaggttacaccacgctgatatttggtttagtggttacagcaattctgtttattaccattttatttgctaactatgccgaagctgttgcagaggccagaggtcgtggacaggcatcttcattacgtgcagcaagagaaaatttaacggctcgaagactcaactctttgacagaccgtcaagcgactcaagttgcagcgactgaacttcatttaaatgattttattgaagtacatgcaggtgagcttgttccagccgacggtgagattgtagaaggctttgcaactattaatgaatcggctgttacaggtgagtcagcacctgtgctacgtgaagctggaacagaccgttcaggtgttattggcggaaccaaagtacttacagatcgtattgttgtgcaagtgactgctgaatctggtcaaagtttcttagaccgtatgattgctttggttgaaggttcaaatcgccaaaaaactccgaatgagattgcgcttggctttttgttaatggtgatgacaatcacgtttttaattgtcgtgattagcttgccatttattgccaagtatttgcatattgaacttgattcagttgtgctcgtggcattattggtctgcctgattcctacaaccattggtggcttgttacctgcgattggtattgcagggatgaaccgtgccctcaaagccaatgttttggcgaaatcaggtaaagcggtagaagtcgcgggtgacattgatgtgcttttactcgataaaacaggaaccattacttatggtgaccgtcaagcgacctctttttatcctttaacttcggtaaccgagtctgagttgagagctgctgcttgggtaagttcacttgctgacccaacaccagaagggaagtcgattgttaagttagcaaaagagcaaggtttaaaacagcaagaacctgagcaagccgaatttatctcttttagtgcttcgactcgaatttctggtgtgaatttaccgaatggtgagcaaattcgtaaaggtgctttagatgcgatcttaaagtttgtagatgaagattattctcaagatttagagttaaaagcacgtgttgaacaagttgctaaaaaaggtgcaacaccattggttgtcgcaaatcaacatcatgtattgggtgtgattgagctttcagatgtaattaaacacggcattaaagaacgttttgcccgtttaagagaaatgggtattaaaactgtcatggttacaggtgataacccattaactgcggccgcgattgctgctgaagcaggggtagatgactatattgccgaagcaaaaccagaagacaaattggcttgtattcgcaccgaacaacaacgaggtcgtttagttgcaatggtcggtgacggaaccaacgatgcgccggcattagcacaagctgatattggtctagccatgaactcgggtacacaagctgcaaaagaagccggcaacatggttgatttagactcagatccaaccaaattacttgctgtggtcgagattgggaaacaacagctgattacccgtggtgctttaacaacattttcgttagcaaacgacgtctctaaatactttgccatcttgcctgcattgttcgctgctgcgattccacaaatgcaagtattgaatgtgatgcacttagcaagtccaaacagcgcgattttatctgcattaatttttaacgcgattattatcccgctattaattccaatcgcactccgaggcgtcaaatttaaaccttcaactgcaactcagttactacgtcgaaatatgttgatttatggagtgggtggtgtggttctaccatttattgccatcaaagcgattgatgtagtgattgttcaattatttggtttgtaatctggagtttgaaatgaaaacttatgcacaaaattcagaagcaaatttgggtcagaccttaagagcatctttcggacttctaatttttacccttgtcggctgtggtgctgtttatagtgcgattgctacaggtgcgggacaggtgttatttaataatcaagcgaatggtagtttgattgaaatagatcataaagttttagggtcaaaattagttgctcagccatttgttggagaggcttattttcatccacgtccttcagcagttgcttatgacccgatggcgatggcaggtacaaacttagcgcgtactaatcctgaactacagcaacaaattgatgctcagattcttgcggtgaaaaaacaagaccacacaggtaataaccctattccaagtgatttagtgactaaatctggtagtggtattgatccgcatattagtcctgaatctgctcagttacaggttgctcgagtggcccaagcgcgtcatttagaccctaagattgtggaagagcttttgcaaaagtatgttgaaccgaagcagtttgatgtattggggcaagcccgtgttaatgtattacagctcaatattgctttagatcaattacaatctacacattaacttaaaaataaagttgttagtttaccggatgatatcaagtgcaaagcaatcgcgaaaatcaggctgaggccttattaaatcatgtcaacagatatcaagccggtcgactaacggtctttcttggtgcggcacctggtgtaggaaaaacttatgccatgctcgcccgcgccaaagaattatttcaacagggcacagatgttgttgttggtattgttgaaacccatggaagaatcgaaactctaaaaattttggaagggttgcctcagattgctagaaaagaaatgcaatatcaggggcatattttagaagaaatggacttggatgctattttacttaggcatccgcaaatcgttttggttgatgaattggctcatcgcaacgtcccaaatagtcgtcatgaacgacggtggcaagatgttaatgagttgctagacgctggtattgatgtatttaccgctataaatattcaacatttagaaagcctaaatgatgtggtctatcaaattacaggcattcgagtaaatgaaacagtaccagatcgggtatttgaccgtattcgagatattcgcttaattgatttacccgtcagtgaactcattgaaaggctccatcaaggaaaagtctatgtaccagagcaagcaaatctggcattacaaggcttttttagcatttcaaatttaacagcattacgtgaactcgcaatgcaatgcgttgctgagcatgtcgattcagacttaaaagagagttatgcctcaaagggattgaaatctatctcgctgcaaaatgaactgatgattgcgatagatggccaaggctcatctgaatatttagtacgggcaggttgtcgtttagctgaacgctatggggcaacatggactgtagtgaatgttgctaaaagtttagactttggacagagttcgggaaattcatataaaaaagaatatattgagattgatcgggcgtttgagctggctcgacaactcggtggtcgaacagaaatcttatatggccatcgagttgcgtcagtattaatggatgccgcggttgaccgaggtatttccaatctggttattggtaaaagtatttcaccgtggtggttaaagttatttaagaaaaatttagctcagcaattattaaatcaagaaaactcgattgctttaaccattttgcacccagaacagggcactaaaaagattaatcagctcgaaaaaccttcatttttatcattaaaagaaagtgtttttgttttagctgttacatgcgcaagtatttttatagctcacttcgcagaagttctatttggtattgaagacttctctgtcatttttattatttctgttttaattgttgcaactaagacccgaatgctcgctgcagtagtggctgctcttatttgtttcttagcctataattttttctttattgccccgcgttatacctttcagatttcagcacaccaaggggtagtcaccgttgttgctttttttgcagcagctttaattgctggccgtttagcttctcagttacgccagcaagttttgtctttaaaagctgcgaatgcctacactacggtaatgcaagacttggcacgtaagctttctagtgcagtaaaccttgaagaagtcatgcaaacaggacgtatgactttagaaacccagcttcagactaaggtgtggatttctattcgagataaaataatttcatctgatattgagctaaatgataaagaaaaagtagctgcagaatggtgtttgaaacatcagcagccatgcgggcgttttaccgatactctgagtcaatcaaactggtggtttttacctcttttagagcagaaaaatagcttaggtattgtgggaatttactttaaggatgaagtggtttccttaaattttgagcaaaagaaattgactgaaagtgtaattgagtacattgcacaggcagcacttcgaacccaattggtcaatgagctagaacaagcaaaagtcaccagtgaaacagagcgcttacgttctgctttattatcttcggtatcgcatgatttacgctcgccactcgcttctattattggggcagcagacacacttgccaattttaaagctgaaatgacagaacaagaccaacaagatctgcttgaaacaattcatttagaaggtgagcgcttagaccgttatattcaaaacttgcttgatatgacgcggttggggcacgaaggtctaactttaaaaagagactggattggggtagatgaattaattggttcggcaacccgccgtttaaagcgttataaaccagatacgcaagtggtcgttcagttacctgagcaatcgattagtttgtatgttcacccagcgctggtagagcaagccatttttaatgttttagaaaatgccgcaaacttttcacctccagatgaatctgtcatgattcgtgctcaactttcgtcagaagatgaggtgaaaatagaaattgaagataaaggtgcaggaatccctgaagacgaaagacaccgcattttcgatatgttttatactatagagcgtggagaccgtggaaaattcggtacaggtttagggctaacaattgtaaaagcgattattggtgctcatatgggtacaatagaagcattttcagggcgccaaaataaaggtactttaattcaaatcaaattacccattcatccagtaaaagaataagttgcaaattcatgataagttcagaaacatcacctgtagaaacacgtattgtgattattgatgatgagcctcaaattcgtaaatttctagacattgctttaagaactcaaaaatataaaaccacgctctgcgaaacgggatacaaaggcctagaggctttggcaacccaaggggctgatttggttattttagacttaggcttacccgatttagatggaaaagaagtgcttcaggaattacgtagctggtcgaatgttcccgttattgtgttatctgtacgtgctgatgaatatgaaaaagttgccttgctagacgcaggggcaaatgactacatgaccaagccttttagtgtgcaagagcttttggcgcgcattcgtgtcatcttaagaaatcaaccaatccagcaagaagcacatatttatgacgatggttatcttaaagtcgatgtcacgcaacgtttagtttggatcgagcaacagccaattactttaactcgaaaagagtttcaacttttgacgttattaatgcgctaccaagggcagcttttaacacagccacagctcttaaaagagctatggggacccacccatcaggaagatacgcactatttacgtattttggtgggtaaattgcgcagtaagttgggagataacgcgattcagccacgttatattgctactgaaccaggtgttgggttacgttttttagctaaacagaaaaatcattaatgagatataaaaaaacccttagggtatttctccctaagggtttgcaaagtggtttatagtttttttgctctttttattttatatatcccaatgttgttctgcttcagtcatttgactgtaaatattttgatattcagcctgtttaaccgtgtaccaatgttcgacaaagtctgcccctaaatacccttttaaaataagacttcctttaaatatttttaaggcctctggttggttgttagctaataaaatgtgctcgtctggaaattttaaaagatgtgcaggttttggcagtggtaacttatgagataagccataagacgcgcccgctaaaatagtcgctgttaccaaatagggattacagtccgctccagcaacacgatattctaagcgttgattttgtacgtctgagcatggaattcggattgcaacattccggttgttagtatcccaattggcttctaatggcacgtgatgaccaattttaaaacgtctataagaattaatattaggcgctaaaatcgccatagatgcaggcattaactcaattaggccactaatcgcgctcaataatttggctgaaagctcatctttttcttctgagctaaatatattttgatggtattgattcagcatgctcatatgaaaatgcatgccactaccagcctttgccaagtttggtttcgccatgaaacaagcggttaagtcatgctttcttgcgacttgttttacaattctttttaaagcattaatttgatcgcagagttttaaaatgtcatggctgtgttgaagatttaattcgtattgtccaggggatgattccgcaacaattgcggtaatttcaattgattgtagtaaggctgctttttcaacttcatctaggacttgttgatagttatttggcgcatctatatcaaaacattggttttctgaacatgtctcgaattgatgctgaggtgagaaaaggtaaaactctagctcggcagccatgacagggaaataattattagcatgtaactgatttaataatttttttaatatattacgtggttcatagcgacagtctgaaccatcttcttcttgcatggataggtaaagctgagcatttaattctggggataaggcactgggttgcaagctgtctaaaatgggcaggcaaagtctatctggttcaccaatatattttcccagacctgtttcttcaatcacttttccatcaaggctcatggcataaacagaaagaggaaaataacatccattcgatagattttttagactcttaacgtcaatacgtttgccacgaatatgcccgtttaagtcatgtagacaaatatcaatgtgctgagtgtgaggatataaacttaaatattcatcaacttctttcaaaaaaagctctgagttgaacgtatgaatttgcgtttgtggaataaaatcatctgatattttaaatgccttaaagtgaggatcttttaagtttaaatttgggtaaatatgagtactcattataaaaaccttggtggttatttagctcaaatcctaccgtagcctttggcgttaatcccgtaaaaaaagagtaaaaagacaaagggtttttttataaataattttggatttttatattaataatcaataagttaattgttatttttgtggtaaggttttaaagtaaaattaacgtataagggccatcaaagagttgtctgatcgttcatgatttcgcttttaaaattaaacataattaagaattgtgatccttaaatttggtgagatggtcaaactgctttaaacttaaaatcttatccagttaaacatttatgtataaatcttgaattgagcaagacttatatagtgtatgtactggaattttattttttgcgtttttttaatttttatttttgagttctcttaatatgaaaaatatcggtttagccattttagcaatcagcctttcaggttgtgctgcaatgagcgtagaagaatgtaagactgcgaattggtcattagtgggtgagaaagatggttcgaaaggttcttcgccacgtttagatcaatattacaaagcatgtggaaaagccaatattgttccagatcaaaagtcatatgaacgtgggtataaagaaggccttggttattattgccagccagcaaatattttttataatgctttagaaggtaacggtaatattaatgtatgcccagttgagcagcgtaatcgtttaagaccttattatcgagctgcctcagattactacaatgcaaaagctgaatatgatcgttatgacgagaagtttaagcaatattctgatagcgcttataacgaaaaattaaagccagaagagcgcgaacgctatcgtaaacttttaagagaattacaaattgatcgtgaccgtattaacagaaactattggaactcaattcgagatatcgaacgttttaaatatgatcatggattaaaataatattttaaaaaaggattgatctgtttgagatcaatcctttgtttttttaaagataataactcgtttttgtcattaactttgaaatagcagtcatcgtgatttttactgcatatggtaattcaacaccacctgcttcaagtgcagtatgacggtgatgcaattcatcttcattcatttgctctagaattttgcgcgagcgttcatcttgagctggtaactggtttaagtgatcttgcaaatgtagactaacttgacgttcagtttcagcaacaaaacctaagctatatttatcacctgcaataccggcaagagcacccataccatatgaaaggccataccaaatcgggttcaataagcttgtatgactatttagctcttttaaacggtcttcacaccaagctaaatggtcttgttcttcaatcgctgcctgttgcatttcgcggcgtacatttggcaatttcgctgtcaatgcttgcccatgataaagtgcttgagcacacacttcaccactgtggttaacacgcattaaacctgcaacatggcgagcatcttctacaccaagttttgcttctactgtttcagctggattttggcgctgcgctgctgttgcacccggaacaagactacgtaatgcttgatcaaaagagttaataagttgatcaattccagtatagtggcgcataaattagtcctccaaagaaagatgtgctgtggcaagcattggttttagtcgggcaagaagccatatactaaagattgcactaagtacagctgtaataataaatagtattttaatatcaatttttaaaacacttaagattaagattgagaaaattgcagaagaaaccataaaaacggcatttaagatgttatttgctgcaaccactcgggcacgatgtgagcgtggtgagtaagcctgcatcatggcatatagaggaacaatataaaaaccgccactaatacccaataaagtcacagcaatcatgacatggtagtaagcccagccttgggtaaaaacatcttttaaagtcagtaatgctccagttctttcaggtacaaaagccagactggctgcaaggtagagcgcaaaaacagtaaggccaactgcaccgattggcaccattttaatattaatttctgaaccaccaattttgcggcaaagaagagaacccacaccaataccgactgaaaagaaagtgagtaataggctaaccacattttccgatgcatgaaggttttgttgagtcaactgcggaatttgggttaaataagtcgctccataaaaccagtaccatgagttacctaacaaaattgtaaacactaacggtaagcttttggtatatttgatagtttgaaagcttgtacgaacaaagttccagtcaatatctaaatcaggtgcggcaactttttgtggcaagatgaaacggctgaataaatagcctatgcaagcaatcgctactacagtaatactaatccacaataagtttccatctgatgatgcaattacggcaccccccaagatcattccgaataagatggccatggatgtaccagactgaaacagggcattgccagacatgagttcatgtggttttaagatttctggcaaaatggcatatttaatgggaccaaagaaagttgaatgtgtgcccatcaaaaatagggctaaaagaagcaaccataaatgccccaataaaaaaccggcagaaccgatgagcataataatgatttctaaaatttttatgccacggacaagttgtgagcgttcatacttatcagcaatttgtccggcagttgctgaaaaaaagaaatatggcaaaataaacaacaatgctgctaaattattgagtgtgtttactggtgcagattgttgctgaatccaaccataagtaatgactaacaataaagcttgcttgtaaacattgtcatttaatgcgccaaaaaactgggtaaaaaacatcggtacaaaccgacgtgatgtcatcagggattcatcttgtttcatcatgtgcaagcttcattgagttttataaaaaaatgtgacggagtgttaatttgcatctaaaaccatgtatgatatttttaacgcttgattaaatgaaaaatcaatggttttgagtgagttttgtcctcatattggtgcgtttattaaaaaataagtttagagtttttcatgccttctaaaattaagtttaaacagtcaactctttctcactctatgcatttaatcttaaaaatgcagagtatacctaaacttatttgtagcagcttattattaagtttatgtgttcctccttgttatgctcaaagttcggctgagaccgttacaccagaagcaaaccagacggtaacagattcattggtacaacaaactaatacaaataacccaagtgatgttccaattaccgatgtcgctactcttgtaactcaagcacagcaacaacaagatagcttggctatattgcaacaacaagaacaatttccgaatcagattgaagaatttaagccaattacgcttgataatcttgaagacttaccggttatgcctgttgaccagaatatggcaaatgaaatttatcgggtagcagaagaggcaaaaaacgaggctcaaaacttccaaaatggtacgcaaaaacaaccagaaatggtggtgaatgacgcatcacaagcagaattacatgaaattaatcaggcccctgtaaatattgaccagctcatgcatgagattcaatctgatagtaagattgtggttgaagccaatgaaacaggaaaaactttacctgagcttactgctgccgttgaagagccacccgaagaaaaaggtttctttagacgtatattcaataaaatccgtccacctcgggtaattccaatggagcagataccccgtattactgctgaggttacgggtgcgccagatgatttagctaaaaatatcaaaggtaaattatctacatttacccaagaatcatttgaagattttaatgcagcgctaccgcaacttaggagcttaagtaatcaggctgctcaagctgtaggttattacaatgctgagtttcgttttgaaaagttaagtgccagtcgcgtacgcgttaatgtaacgccaaatgaaccagtacggattaatgaacaaaacattgaatttactggtgctggtgcaaaacagccacaatttcaggtcattcgtttagttcctgatcaagatgtaggtgatatttttaatcatggcctttacgaaaccacaaaaagccgaattgtcgatgctgcatcggataatggttattttgatgcgtattggcgtttacatgacgtaaaagtgagccaacctgaaaataaagcggatattaatctcaagtatgagactggtgagcgttataagcttggtaaggttgagtttcgcatgagcgatccatcaaaaccattacctttaaatatgaatattcttgaaagcatggcaccgtggaaagagggtgatgactatgctttttggcgtgtaaatgttttagcaaataacctgactaactcacgttattttaactataccttggtcgattcaattaaacccgacccaattgaaaaaccacttgagttaccacccgatttacaagcgttggtcgatcagcagaatgttgatattgacgaatcgaagctacttcctttagagcaacaacaacttgccaaagcacgccagttggcttcctcaagtaaagaagtaacacaaaatgtggtagatgaaaaacaatttgccgggactgaaagtgtacaagccgcacccgcatctttaaaagctgcgactgtacagcatgaagaacaagagtctgaacaagaccgtttacaggctcaagctcgggaagaaaaacgtataccagtgattgtgacgttaaatgccgataaactaaatagtctggaaacaggtattggttacggtaccgacactggcgcccgtttacgtagtcaatatagacgttcgattgtaaataaatacggtcattcatttgatgcaaacttggagctttcccaaattcgtcaatctatagatgggcgctatagtattccttataaacatcctttaaatgattactttaatattgtgggtggttacgaacgtgagacgagagatgatattggtccggatgtaagcttacttacagaatcggcagttttagggggtgagcgagttattaaaaaaccactcggaaactggcaacatactattggggtacgttatcgtctcgaccgcctaactcaaaaggggaatgtagatatctctgagctaccagatgcatttaaaactgctgcatcagagcaagaagcattattatttagttatgagacctctaaaacctcaagtaatacacgcttaaacccaaccaaagcttttaagcaaacttataaattagaattaggtagcgaaagtttactttcagatgccaatatggcgattgcaacagccggttggagatttatttattctttaggtgaaaatgatgaccatcagtttgttgggcggtccgattttagttatatttttaccgatgagtttgataaagttccatacaatttaagattctttactggtggtgaccagacaattcgtggttttgattataaaagtctttcaccagaagataatggatataagattggtggacaggctctagcagtaggctctttagaatataactatcaattcaaagagggttggcgagcagctgttttttctgattttggtaatgcttacgataagagttttagtaatccgacggcctatagtgtgggtgttggtattcgttggaagtccccaattggaccaattcgtttagacgtggcttctggtatttctgatgataaccatccgattcgtttgcatttctttattggtccacaactttaaaaataaaattttattaggtttattttatggcggaagtagaacagcagcccacttcggcacctagctctcctaagaagcgacgtattttgcgtagcttcttgctgacaatcttgatcatacttttattacttgttgcttccatcattattatgatgtcgactgaccgtggaagtcgttttttattagatcgtgttttacaagctcagcaagtcattaaatacgagtatgaggggggtaatttactcaggggaattattcttaaaaatattattgttcagttaaaagaagttgacgttactttagatagagctgatgtccgtttagggtggcgttctttaatattagaaaaagaagtgcatttgagcaatgcagatgtccgtaacttagttattattaacaaagctccgccatcggataagccatttgagtttaaacccattaaattaccatttgtgcttcgtgtagatgttggagatgttgatcatttagaaattaaaaattcaggttctgtcgtaaatttccatgatgttcatttaaatgatgctttgtggtcagagacaaaactgaaatttgaaaattcaagtatggatatggggtatctttctgttcataacgcaacaggaaatatggactttagcggcaaatacccactgaatgcgactgcagatttaagaattccttctttaaaaagtttaaacatccaaaatattaaggtggcagcgcggggtagtttagataccttgcaagccggtgtagcaacgacaacaccagatttattaacaggttgggttgttttacatcctgttcgtcatgaagtgcctatgcaaggtgcattgttactcaaaaattatcacttgcctttactggttgagcaaaaattatttgctaaaaacggtgtaattaaatttcagggtgatattaagcaactcaacttagcacttgagacagatttaaaaggggagaatttacctgaaggccagtacaacgccttaatgaatactgatctggttcatcagttgaatattactgattttaacgggcaggtcatgaagggtgcagttaatcttaaaggattagtgaactggaaagatcatgtcacttgggacatcaaaggtcgcctagatcatgttaatcctaaagacaaagctattccacaggtcgttcaggatttcttgccgccaagtctagatgcagccgtttcttcaactggttctttggaaaaaggtacggaagtatttgccaatgtagactttgaccgctatgaatcttggaaacttaaactaaaccaagcacctgaaaagaataagaagccacaacctatgtttatgaatgtggcttgggcaaatatagatcgtgctatgccatatataggttggttaagtagtgatagtggtcaagttgatttgactttgcgagatggtcagcaagatattaaagtttcgacaaaagtatatcagcatgaacagaccttattaccggctggacaatatttagcaactttgaatgttaaagataatattcttaatgttcctagttttagttttgcggctcaaaagggtagcctcacaggtcaggccaaagtcttattaccaagtgaaaaacgtcagctggcatggaatgcattattaaatgcaaaagactttaatccacaaagtatacatacagcggcgccagttaacttgctcaacggatcaattaaagccagcggttttgcaaagccaaatcaacaaattattcagcttgaaaaaattgatttaaaaggtcgcttggctcaagcaggtcaagaaatggttgcgctagctggaaaaagtacagcagctttattatttaatgatgttaaagctggtggcggttttaaaggctttgcggtcaattatgacggatctttaaaagcgcttaatcaagctaatggactattaaagttttctattgcaggtaccccagaatttatccgaattagtcagttacaacatgatggtgttgctgggaaaatctatgcgactggggcattaaatttaaaagaccgtattgcttgggatattaatagctcgttagtacgctttaaacctcaatattttgcctctagtgtaaaaggcgaaatttcaggaaatgtaaaaacacaaggcatctggtctgacaagttaaagcgtattgatattcaacaattgaaccttgcgggttatttgaataataagccagtcagaggtaaaggtaacttatccatacttatggattcgaaccaaaaaggttttttacctcagcaatttgaggcaaataatctatttttagtttatgcacaaaaccagttgcaggcgactggtaatgcacagaatttaaaaattaagctgaatgcacctgcgctttatgagttgtatccgggtttaagtggacgtgcatatggagacttgagtgtccaatctcaaccgcgtttgaaagctacggctaatattgcggttgataattttgcatttaatacattagtcagtattaaaaaacttcgtatccagggtgaattgcctacttccgaaacaacaccaactcagttaacagcaaaattagacaatttacgtagtggtagccgtcaaattcagtctgctgaggtgaatttaacaggaacaagaaaagcacatttattaaaagtgcaaggaaataataatgtttctaaattctatgttcagttagcaggtggatttaatgcgaagaatgattggttagggcaaattcaaaaaggaagttttgattcacgccgaattcgtctagcacaaaatcaaaatgcaccagttgttttctcatcggcacgttctgaattatatgttggacaacattgctggcaaagtacaaatagccagttgtgtcttgaccagcctgtgcgtgtgagtaaagcgcaaggcaatatttcatttgttactcagaatctagatttaggcgattttgctgcgttcatgccggaaggtttggctatgactggtcaacttaatggttatgctaaagcttcttgggtaaatggtgggcatcctaagcttgatgcacgcttagtgacaagaaaaggtgaactgggcttagcagcggaagacccgcaagatccaccgactactttggcttatgatgaactgagtgtaattgcgaaaagtatttcagaaggcttattgttccgtgtcgatgtaaaaacacctgatattggtacaggatatgcgaatgttattattaatccttaccaatcatctatgccgatgcatggagaggtagcttttaacgatgtacagttaaaagtgttaaaaccattcattcaagatgtacgttcaatgagtggtaccttagccttagctggcaaagtgaatggtactttgacccagccacagtttacgggcgaaatgcgtttgaaaaacggggcaatcagtatgatttccctgccggttaatttaaccaatgtacaggtgtattcatctattcatcaggacatggcaacaattgatggtgcattcaatagtggacaaggtgtagggttacttaaaggtagttttgactggaaaaatgcaccgcgtctacagttaaacttaaaaggtgataacttacttgtacgtcaagctccattaattacggccattgcaaatccgaatttgacacttgatatgtatccttttgataagcgtttaagcttgaaaggatcagtagatgttcctcgtgcacgtatttcaatgcctgaaacaactgcaccagtggttaacacatcttcagatgttcgtattgttcgccaaggtcaggacccacttgcaattttacgtgcggcaaaaccgtgggatatccgtgcagatatttcggtaaatattggcaatcaagtcatcttccaaggctttaacagtaatattcctttagtggggcgtttgaatttaacccaacgcggttatgaaacagcaatgcgagcaatgggtgctattggtgtaagtcaaaaagtgaaaattgaggcctatggtcaaagcctagatttaaaccgtgcaattgcccgttttaatggcccattggcagacccgacgttagatattgatgcgaataaaaatgttcagggtagtatggttggggttcgtgtcactggtactgcttcatcaccaaacattcaagtttataatgatgcaggcctttctgaacaagaggcattaaatgcactcgtgacagggcgtattaatgaaggtgccagtggtttaagtaatgcagaaggctttaaatctgatgtgaacaatacaattgctgctgccggtattagtatgggcttgggtggtactcgtgctttaacgaatcaaattggtcgtacttttggtttgagtggtcttgcattagatgctcaaggtacaggagatgatactcaagtaagtttaactggttacattacacctgatttatttattcgttatggtgtgggtgtgtttactccagtcaataaactgacgttgcgttatcaaatgaaccgccgtttgtatttggaagcaagtcaatctttagaacgagcaatagatttattctataactggcgattctaaacgctttaagaacactaaaaaccgagatgaaaacatctcggttttttattgaagttgggcaaaaataaagacatataagtagaatttttgcaaagtctgccagattcagtatgatgtgggcagcatagtctgtgtagagtaatgatgaaaaaagttttatttgttttaatgggcatgttaatagtcggctgtacagaaaaaaagcctttaacacctgaagagcaatggcatggctattgtacaagtgtggggaatgcagcaagaagtattctgtttgatcgtcagcaagcaattgaaaagtctcaagccattgagcatgctaataaaattgaagacgaaattacgaaaaaattcatctttaatattattgaaaaagtttacgccattccacaagacgaattaaaaacgaatccagaagccttgcaagaaaagattagaaaacaaatgacagatgagtgtttggttaccccacatgacaaaatgccaaactacaaaaaattctaagtgtataagacatcgtcaaacactccactaaggtggagtgttcttttaacttaaaataccgcatgataaatccatcattaagatcattatttatacacgggtatttagttacaaaataatgggcatcacggagaaacaccccgcgctcattaacttttggcttgaactctagtaaaattttgtagtccatattacttgtgaagctttgtgaaagctggaatttacaagtaattttttaaaaaaagaggaatgaacaccgtgctagaagcttaccgccaacacgttgctgaacgtgccgcactcggagtcccaccgaagccacttgatgatgctcaaactgctcaacttgttgagttattaaaaaacccaccggcaggtgaagaagcattcttggttgatttgcttgaaaaccgtgttcctgcaggtgttgaccaagcagcttacgtaaaagcagctttcttggcagcgattgcaaaaggcgaagcgacatctccgctagtttctaaagaacgtgcagtttatttactaggtacgatgcttggtggctataacgtagcgcctttagttgagcttctggatgatgctgaattaggtagcttagctgctgaagctttgaaaaaaacattacttgtatttgatgcgttccatgacgtagctgataaagctaaagctggcaatgcaaatgcaaaagctgttttacaatcttgggctgatgctgaatggttcactagtcgtaaagatgtaccagaagaaatcaaaatcactgtgttcaaagtaacaggtgaaacaaacactgatgacttgtctccagctcaagacgcatggagccgtccagacatcccattgcatgcaaatgcaatgttgaaaaatgagcgtgatggtatcaaccctgaaaaaccaggtgaagttggtccattaagccaaattaaagaactcattgctaaaggcaaccaagttgcttatgttggtgacgttgttggtacaggttcatctcgtaaatctgcaacaaactctgttctttggttctttggtgatgaaatcgctcacattccaaacaaaaaagacggtggtgtgtgcttaggcggtaaaattgctccgatcttctttaacacaatggaagatgctggtgcattaccagtagagatcgatgtttctaacatgaacatgggtgacgaagttactcttaaaatcgatcatgctgctgcaaaagtaactgcgttcaaaaatggcgaacaaatcgctgagtctgaacttaaaactccagtacttttagatgaagtacgtgctggtggtcgtattaacttgatcattggtcgtggcttaactgctaaagcgcgtgaagctttaggtttagctccatctacattattccgtactccagtacaaccagctgacactggcaaaggtttcactttagctcagaagatggttggtcgcgcatgtggtctcccagaaggtcaaggtatccgtccaggtacttactgtgaacctaaaatgactacagtgggttctcaagatacaactggtcctatgactcgtgatgagttaaaagacctagcttgcttgggcttctctgctgacttagtaatgcagtctttctgtcacactgctgcttatccaaagccagttgacgtacaaatgcaacatacacttccagacttcatcatgaaccgtggtggtgtatctttacgtccaggtgacggtattatccactcttggttaaaccgtatgcttcttccagatacagtaggtactggtggtgactcgcatactcgtttcccaattggtatttcattcccagcaggttctggtcttgtagctttcgctgctgcaactggtgtaatgccacttgatatgcctgaatcagttcttgttaagtttaaaggtaaaatgcagcctggtatcactttacgtgaccttgtacatgcgattccttactatgcaatcaaagaaggcgatcttactgttgagaaaaaaggtaagaaaaacatcttctctggtcgtatcttagaaatcgacttaacagaaatggaaactgacttaacagttgagcaagcattcgaactttctgatgcttctgctgaacgttcagctgctggttgtgcaatcacactttcagaagagaaagttgctgagtacttacgttctaacatcacaatgcttaagtggatgatttcacaaggctatggtgatgcacgtacgatggctcgccgtgttgaaaacatggaaaaatggttagcaaacccaagcttacttaaagctgatgctgatgctgaatacactaaagtgtatgaaattgacttgtcagaaatcaaagaacctatcctttgctgcccgaacgatccagatgatgcgaaacttctttctgacgttcaaggcgacaaaattgatgaagtattcatcggttcttgtatgactaacattggtcacttccgtgctgctggtcagttacttgagaaagtaccaagcggttcattaacaactcgtttatggttggctccaccaacacgtatggacgaacatcagttaatggaagaaggcttctataacacttatggccgtgctggtgcgcgtacagaaatgcctggttgttcattatgtatgggtaaccaagcacgtgttgcgccgaacacaactgttgtttcgacttctacacgtaacttccctaaccgtttaggccaaggttctaacgtttacttagcatctgctgagcttgcatctgttgctgctgtacttggtaaattaccaactccagaagaataccaacaatatgcagctcaaattgacagtatgtctgctgacatctacaaatatttgaatttcgaccaaatgggcgaatatacaaatgctgctgataaagtagatactaagaaaattgctgctgctcagttgacttaataggtcgatttagtacaaaaaaggagctgattattcagctcctttttattttaatgagaattggtacatattttaattattaaaataataaattaatcatgttttattctaataaaatgtaaaaataaatataacgctagatattaaagaagattttgttttaaaatatttgtatgaacttaaaaataattaaaaagaacatgggtattttatatatggaatttaaaaatgctaaagacaattgttgaatttaaatttgatgattatcagctatatgatcaaaatttatcagcagaagacgggaatactttagtacagaaaactgaagatattgcacaatatatttatagtatattaaaaaatagatatcacttaaatattgagttaaatgctgagcgttggggctgggaaatagaagtgccattacctgagattacgatgtatatcggtattagcgtttatgaagaatacagtaatggttttgcaatattcatttcaccaaatacaccaattttaagaagatttctttttagaaagttagatattactcaccatattatgttgctacaaaattatattaatgtcattttgaagtcccatgccggtatatatgatgtgcaatggtgggaggaaaatgagtttagatatgttgcagcgcattaaaatataattagtaaatatgaaatattatttatgattgtttagctaatacaattaataaaatattttattggctgctatagtggtgaatttacgtatgtgagcttaatatatgttcaatataacgtggttcagatccgtatgcgaattttagcatggaagacagtacgtcggttcttctataacaaccttcataatcatgattacgaaacgacagtaagtagatgtattaactactttttagttttcttaattattgggaatgtagttgctgtattactagaaacagtaaatgatctgtattacagctaccgtatatggtttgactactttgaaaatgtttcaattgcaattttcagtgttgaatatctcttacggctctggagtatagtcgagcgtgattcgacacaagctgcatggaagcaacgtttcgcatggatgaaaagtggtgaagcactgattgacctcatggcaattttgcctgcgtatctaaatttctttgtacgaatagatcttcgtatgttaagaattttacgattacttcgactattaaaattaactcgttatttcatctcattgcaaatattgttatgtgtgattaagcgagaaaagggttcttttcaggcagtgatttttattttaatcattatgattattatgactgcctctggtatttatgtcgttgagaataaagcgcaaccggaagcttttagctctattcctaaagcaatgtggtgggcggttgtgactttaactacagtcggatatggcgatgtcacaccagtaactagtttaggaaagctattgggagccttaattacaattctaggggtagggattgctgctttaccggctggtattttagcttctggtttggccaatgaacttaaccagcgtaatcagcgccttgaacaagagttccgtgagttacttcaagtgcgtggtattgatatcatgcatgatgaagttgaaatagaacgtattcgacaaaaagtagggctaccaaaagaacaagcgcataatctgattattcaaattatgcgcgaaaaagtattagaagagaaagaagctgttagagagaagaaatgttattgcccgcactgtggtgaaaagttaacagattagagattcaacgaaagcctgatcatactcaggctttttgagttgctttttctacagcaaatgcaataagtaagataataaggccaccaaggctcagtacaaaacctacccagattggtgcaatccaacccatctgatggctcagtacccaaccacctaaaaaagcgcctaatgcattagcaagattaaaggcggagtggttaagtgaagctgctagcgtttgtgcatcacctgcaacatccatgaggcgtgtctgtaaagccccacctaaacccataacggttaggccaattaagaataaagagccaattgcgctatagatattactcattagaaagcttgcgactacaaatgcgatcgctgagctgatgagtacgcctacaatagttttattgaggtttttatctgcaagccaacccgcagctaaaccaccaatcaccatcccgatgccccacagcgctaatgcaataggaacaatctggatattaactttggtgtattcagtgagaattggtgagacatagctatataccgagaacatgcccccaaaaccaattgcgccgactgcaagggttaaccacatatttatatttttaagccccgctaattctgtttttatgctggcagtagcttgaactggaatattcggtacaaagcaagctacagcaattaaagtaaagaatgcgatcgttgctgaaaattcaaaacctgctctccagccaaaatgttgacctaaccatgttgctaagggtacgccaataacggtagcaacggttagtcccatcatcatttgcgcaactgctgaagctcttcgtgaagggcctgctagttcagccgctactaaagcgccgacaccaaaatatgcgccatgaggtaaacctgcaataaaacgagagactaaaacggtttctggggtatgtgctaaagctgtacatgcattggcaataccataaaacagcatgaggcaaagcaatagggtctttctaggcactttggcacccaaaatggcaataataggggcaccaataacaacacctaatgcataagcactaataaaatgcccagcttcaggtactgtaatctttaaattgtgtgcaatttcctgaataagacccattgcgacaaattctgtagtgccaatacagaaaccgcctactgcgagagaaaaaattgccaagaagagtgagtaatgtcgaggggaagatgaaggggattggggtgacgccataataaattaataaaaggaaactcaaaaaagaaagtataagggaaaagagaccaaaataataaaaaactagaatctcgagaggaagtttgcatatttaaaaccggaatattttatctttatattgaataatttatcgaattcttttatcaaattggatatgatgagcgcgtaatactttaagcattacaataagttgtataaatacttaagaaatagagaagttaaatcgtgagaaaattatgtattgcctgccttattggtatggctatgttatctatgtctggttgtgccgtatttatggctggtaatcaaccaagtaaaaaaatttaaatgttttaaatccgggtagctctcgtaattatgttattgcagagtttggggcacctgtcttgtctgagtaccgtgatgggacaagagttgaaatctatacattccagcaaggttattcaaagtgggtaaaagtaggtcgtgcatttgggcatggggttgcagacgttgcctcaataggtttatgggaagtatttggaactccagctgaagcatactttaatggtaaagaaacaacttatgaagtgacttatggtgaagatgatttagtaaaaagttataagctcattgactttaatcaagcttttccaaaagtaaaagaacaatgaggtaatgaaagaggccacttggcctttttctttttatataaaaatctttaacttaaatttattaatgataataagaattatttttatttgtgtataatacatttgcttatgatttgtctgtaaaaatttaaattttcctaataaggatccagaaataatgaatagattattagtaacatcacttatttttgtatgtagttacagccttgctcatgaaccttatgttgcgccattagcgtataaaactgagcagacgcaagtaccggtcgttgctggttatgctgaagaagcactaaatagtgaatacgctttaaaagatgccaagcttaccgtcattacccctaaacaagatcctaaagttattaatgctgaaactctacataaatctgtaactgttttcgatgttcctttaccggaagacggtacatatattctgcaaactcaggcaagttaccctttaaaatatgtatatgatcaaaaggagtggcatttattttttgatttaccagctgataaagctccgccaaaaaaagagcgtgactatctaattcctgctgatcttaaaactaaaaaaattaaaacagaggaagtaacaagagaatgggtgttacaaagttatctttcaaaaggtaaagtttcagatattcaacttccaaatacaccagttaaagttaatttttctgttcatcctaaccagcttaaagttactcaagcagttcagctaaccataagtgaaaaaggcaagaacctaccttatgctgaaattaatttaagagagaaaggtgcaactgataaacaagtactacattttaaagctgatgataaaggacaagttgaacttaaatttccaaaagctggagaatatttaatggaagtcacagctccagtggatttaaagttaaagcctaaaaatcaaaattatatgattgttagcttacaagtgaccgagtaagaatatttcattttataaaaaatagatctgaatgggtctattttttatttgttagtaaagtccatatctaataaacaaaaacttatgttgagacaaattaattaattttgtgataagatgaatagtattcattggtgatgatttatctccgtaactctgtttagtaataaacaagagataacttaaaaatttatagataaatttatgtattcaggcttgtgcccatgttagaaattcgacaccttaaaactttagttgctttacgtgaacatggttcactggtcgctgcagctaatgacctatgcttaacgccctcggctatttctcaccaattaaaagaattagatcattggtatggggtagaggtggttaatcgccgcagtcgacctgttagtttttctaatgtaggacagcgcctacttaagttagctgatgatgtattgccgcaaattcagattactcagagtgatattacacgtattgtgcacggacaaacgggcagaattattttttcatctgaatgtcatagctgttttgactggctaatgcctttactcaatcagtaccgtcagcaatatccagatgtcgatttagactttgcttcggggtttgaagcgaacccacatgaacttttacaaaatgctgagtttgatttacttattacagccgatccgatcgcgctaaaaggaatcgaatacttcccgatttttgaatatgaatcgcgtttggttttatcaaatactcatcgattggttcgtgctgaaaatattactgttcaggatctcgcagaagaggttcttattacttacccggttgataagcaccgtttagatatcatgtcgaaactgtttatacctgcaaatattcaaccaaaacaaatccgaacaacagacttaacgcaaatgcttattcaacttgttgcgagtggccgaggtattgctgctttgccagattgggtagtcaatgaatacgaacaaaagggatgggtgactagccgccgtctagattgtgtttctccaacaggtttaagacgtacattgtatgcaggttatcgaactgaagaaaaagagaagagctactttgaaggtttcttaaagcagctagaaaagttttctttaaaacgcacttcttactattcaggctaaaagtacttatttagcctaagcatttattaaaaggtaccttcgggtgccttttatttacctataaataaagataatagacctgctgcaatcagcgggccaacaggtacaccacggagtaacgctacacctgcaaccgtaccaataagtaagcctgccacaacatcaggttggctcgacataagttttacaccacgaccacctagccacgcgacgagcagaccaattgcaatagcgactaaagatttaaaactaataaaggattttaaaatactctctccactaagcttgccacttgcaataggggtgagtacgccaattgttagaataagtatgcctaagtttagtccatgtgcctgaatataaggaaaaaattgatttaatggcgtaatttttatgacgattaaaacgcctgctgcgatagttacagctgcattttgacttagtaaaccgcagataagtaaaactaataaaacaactaaattaacatcaaattgggcaagcatgagaagcggcaagaaaagcaaataatttgaattgtataataattgagagccaaaatgtcagagcttttaaggttaaaaaagatcaaacaaaggctttttagtggaaattttcttgtatatgactcaatgataaagagttttatctgtggttacgcttggaaacaatgttatataaattaacaacttaaaaagtattcttttgagagagtgtgatataaaaataatcactactcatgagtacaggattaatcttatggatattatagatatcaagatcaaagaccaatttgatcaaattcatgatgcgaaagctcaattaaagaagaatttagttgaacatgaaaatgagcctttaaagctaagtcagcgtatcgaacatattattgtagataatgaggtgatcttacccactacagaattgctatttgaaagtgaacaaaacgaaaaaatttatcgtgttattgaagaataattcaaagttaatgaagttaaatgcgaagatgataaagcagaaggtaataaaacactaaaattacgttaaaataatggtttcgttttaaagagaaagctttatgctgctggaaaaaattttacaatcacaagggtttggttcacgtaaatattgtcagcagttaataaaaaatggttcagtaagtattgatggggaggttgtgagtgatctcaaaaagcagttcgccccagaaaattttgagttttccgtttttggtcaaaattatcaatatagagaaaaaatttatattgctctaagaaaacctcagggtttcgagtgttctcatcatcctcagcatcatcaaagtgtttttagcctactgcctgagaccatgattcatcgtggtgtgcaggcggttggacgcttggatcaagacacaacggggctgcttttacttactgatgatggtaaatatctacaagctttaactcatcctcgtaaacatgtaccaaaggtttatcacgttacaacttacgaccccgtaacccctgagcaaattgaaatgcttattcagggagttaatttacaccaagaaaaaggggtatttgctgccacagatgtagcactactagaaactcatcaattaacgatgactattcatcaaggtgtttatcatcaagtcaaaagaatgattgcagccgtaggcaataaagtcgagaaattacatcgacatcaaattggtcaattggttctacctgaaattgaggacggggattgggtatatttgtcggagcaggaaaaacaactcgctcaaaatattatttaagaaaacaatgaaatgtctggaactcactgtctctaataaaccccattttttcatagaggcggtgagattcatgattattcgattgggtttctaggctaatacgtaaagcattttcttgttttgcaaataaaatcgctgtatcaatgagctgttttgctgagccttgacgacggaataggggagtaacatatacatcatctaagatgtagtaagttgaacaagcaactgaagaaaaacctaaataaagcaatacgaacccagtaattttttcgtccttaatatggatgaaaaatacgctctctttattctcaaaacgttgttttaagaaatgatgggattcttcgagattagaagatgcaccataaaattgacggtattcatcaaataggacagcgagttggcttagatcttcataggtcgctcgtcttacaatcattaggcgctccttgtatttatgtttatatttttacaaagagagcataactaaaaaagaagcgaattgacgttaaaagttgtttaaaaatgcaacaccgttaagttttgtcactttcacctaatagtgcatttaactcttcaaataaatcttcatggtcatcatcttcatttaaagttgaagcgttctgatttaatgaagatgcttttgcttttctcagttttaataattgttccatattaatattctggttttcgatcgcaaaaggaatagatttggttaagacgacttgtttaaagaacagtcgtactgcttgggcaggggtaatccccaattgtttaaaaacagcaaaagcctgttttttctcttgggagtcaagtcgaacctgataaacttctgtttttcgcatgaataacaaaaccaaatgatttttaatttttagggatttattttaaaccatcggaatgtaatttcaatgtctttcagcataaaaaataatctttttgtcattacgatgcgattacagtgtcaattcaagctgtgaattgaaaaccatttcctgttttgttagcgggtctataaaagaaatttgcttagctagaagctgtaagggctgagaaaaatcatcatcggctttatgttgaactattggataaaacggatcatttttaatcggaattcccaaatgatttaaatggacgcggagttgatgctgttttccggtggttggcgttaaacaatatttagcccatgagtgattatgttcaatcagctcaattttagtttcggtattggtttttgtatgtgcaatcacctgcattgtataaaagggtgtacctttatctaaatacagttttaaattctgaggaaattttaattcagctttatatgcagcgattgcatggtaaatcttattgacttgacgatctgcaaataactgttggtaaattccacgtgactgtggtcgtttgcaaaataaaacgacaccggcagtttcacggtctaatcgatggatcggggttaaaaactcattgccagtttgcttttttaatcggactaataaagtttcttgtacatattgccctgttgggctaatcgttaaaaaatggggtttatctacaacaagcaagtcatcattttcaaataaaatctgatgctcaaagggaacatgtacttcgttagcaaggaatcggtaataaaaaatatgcgtgtttgctatataagggctgtttaatgttaatttttcgccatttgccgcgtaaataagcccatcttgaaaacgctgctgccactctgttgcttttatatgtggaaaattttcgcaaagaaattgatagatggtttgtgctgtcgtttgtggaggaagatagacttggcttgcgcttacgccatcaatcataggtgggaaaaattcaatcggactagacataaaagtgtgtcaatagttaataaatgtgatgtaaaaaaaagccaactttaagcacttaagtaggctttaaagcagggcaatggtatcatatcgattattttgaatcatgttatgtgtgttatgtcgtattcattgaaaatggtcttaaatcatgaagaagatacccagcgtttagctcaggcattggcgcagcatgttcaagctggcgtgatttatctgattggagatttgggcgccggtaaaacgacattgacccgttattttttgcaagctctagggcataaaggctcggttaaaagtccgacgtatacgttggttgaaccatataaaatcaataataaagaaatttttcattttgacttatatcgtctcaatgatccgtacgaacttgaattaatgggaatccgtgattatctagatattcaggatgcactatttttatttgagtggccatcgaaaggtggagacgaaatccctgaagcagatatcgtcattgatattcaaaaatcagatgatgaactcaatcgtttcgtcaccttaactttaccaacagagcatttataccagactttgcaggaacagcttcatgactgatgaaaagctaacacaacgtcgtattcatacattagacgccgcgttagcgaaccagattgctgccggtgaggtgattgaacgtccttcatcggtcgtaaaagaattattagaaaactcaattgatgcaggtgcaaccgaattaattgtgcggattgcacaaggcggctcaacattaatcgagattattgacaatggacatgggattcatcctgatgatttaccattggcagtgatgcgccatgcaaccagtaaaattaaaacagcagaagatttacatgccattgttagcttaggtttccgtggtgaagcacttgcttctattgcagcagtttcacgattgactttaaccagtagccaagatgaaagcggaattggtcatcaggttgaggtgaatggtaccgcctttgatcatcaacaagtccaagctgttgctgcacaaaagggcacccatattcgagttcaggacttgttttttaatgtgcccgctcgccgtaaatttttaaaaaaaccaaccactgaatttgggcatattgaagaaattgtacgccgtttagctttaacgcattttgatatacgttttgtacttgagcataacgataatattcgaattaatttaccaatagcagatagcggtgaattaagatttcagcgtgtacagcaattattgggtcaacagtttgttcaaaatgcttactggatcgatgccgaaagtattaacatgcgtttgtcaggttggctagggcatccttcagatgcacgtgcccaagcagacttacaatatgtgtatgtaaatggccgaattgtgaaagataaaaccatttcacatgctttaagaatggcatatgacggtattttacatggccatcagcattcatcttatttacttttcttagaagttgatcctgaaaatattgatgttaacgttcacccgacgaaacatgagattcgttttctaaatcaacgtgaagtacatgagtttgtaagacattatgctaaagaaacgttagcacaatttcagacagctagtgctgatttagcacaagccatgaaagtggatgatactcaaaatctttcggtacaacctcagcctaaataccaagaacaatttacattgcaccgtacagcgcaagccgctgatacagcagtagacaagccaaatggttatcagccttctactgagcttttaactgattttaataatagtcgtccccaatctgttcattatgcggaacaaactccaaaatataatggttctgcgcagttaaataatgcattaaagacttacttggcaccattacgtgatcaacctgctaatttttcagttgatgaaagtattgagcctgtcgctaaggtagatgaatttccactaggtatcgcaattgcccagcttcatggaatttatattttggcgcaaaatactgaaggcttgattattgttgatatgcatgcagcacatgagcgtattttgctgcaacaaatgaaaaatgcttgggataaacctgagttttggacatctcaacagttgcttatccctaaagtgatctcaattagtcgtatgcaagctgttcgtgttgaggatttaaaacctcagcttgaacgcttagggttagagattgatttatatggcgatgagcaagtcattgtgcgtggtgtgccggctattttgcaaaaagcggattttgaaaatcttattcccgaacttctcaatgacttagatccaaatgatgaagcacaaggtttattgcaaaagcgtgatgaactgttagctggtatggcgtgtcatggtgcagtacgtgctcatcgacaacttagtctctcagaaatgaatgctttacttcgccaaatggaacaaaccgaatttgcgagccaatgtaaccatggtcgcccaacttggcgtgcatttccattatctcaactagataaattatttgctcgaggagagtagttttacatgtcaaaccaattgcccgtcatcaatttaatgggaccgactgcaagcggaaaaaccgctttggcatgtgaactctatgaacgtggaaattttgaattaatttcagttgattctgcacttgtatataaagatatggatattggtacggctaagccaacgcgtgaagagcaggagctatatccgcatcatttaattgatattattactccacttgaggtctattcggctgctcagtttgttgaagacgcttgtgctttaattgatgagatgcattcacgtggtaaaactcctattttggtaggaggaaccatgctgtatttcaaagctcttttagaaggattatcaagtaacttgccaagtgcagatgcaaatgttcgcgcagcaattgaagaaaaagcagcaaatgaagggtggcaagctgtttatgatgagctggtagcagtagatccggcggctggagtgaagtttaaggtttctgataaacaaagaattattcgggcgttggaagtttaccgtattacaggtcaaccaattaccaaattgcaggcagaacaaccaaaaaatgtaccatatcgatacacatttcataactacgctttacttccagatcggttagaattacatcaacgcattgagcaaagattaagcaaaatgtgggatatcggttttttgagtgaagtcgagtctctaattgaaaaatacgatttagatgaaaatttaccctctatgcgttctgttggttatcgacaagctctagaatttctattaaaaagtgatatgagtctcaaaaaaaagcaggaaatggaggataaagccttatttgcaacacgacaacttgccaaacgtcaatatacgtggttacgttctttgcaagaaatacacgattttaaaacttacttgacgataaagcaggcgaaagaagacttgcgaaactcttatggataaagcaaaatttgcacactgtctttttataatttttagttgaaaaataaagatagtttttttgcgctgatttaaaaattttttttggagttaaaaatgtctaaaggtcaaactttacaagatccgttcttaaattctctccgtaaagaacgcatcccagtttctattttccttgttaacggtattaaattacaaggtcatattgaatcttttgaccaatatgttgttttattaaaaaatactgtaagtcaaatggtttacaaacacgcaatttctacagttgttccagctcgcaacccacgtccagcaggtgcacaaggtgcaggtttcccagctcagggtggtagtcaaggtggcttcggtggtcaaggcgctggctttggtggtgctcaaggtgctggcttcggtggtcaaggtggctttggtggtcaaggcggcttcggtggtcaaggtggcttcggtggtcaaggtggcttcggtggtcaaggtggcttcggtggtcaaggcggctttggtggtcaaggcggcttcggcggacatcaaggcggttttgataacgattctaaatttgaagatggtcaagacgacgaaaacaatcgttaattgattagcttgaaaaaaaccagtcagtgatgactggtttttttatggctttaaaaatataaaaaagcatattaaagctacctgcggtccatctctgtttcataaaatttagattaataggttctttgcaaatggtattaatatttgctgcagcattgtgcagtgttctggtttctgtactacttaaaaatttaaagaaaaagggatatcaacccatgcaaatgattgcatggaattacgcaagtgccagcttgctatgttatctgtggtttaagccagatattcagcatatttctatacaacatacaccttggtggctaatagcggctttaggcgtcattctaccgagtatctttttatgccttgctaaatctttagagtacgcaggtattgtcaaaaccgaaattgctcagcggttgtccgtggtactttctttattggcagcttatttctttttccaagagcagtttaattcacttaaattattagggataggtttgggaatttttgctgttctcttaattttattaggtcatttcaacgagtcttccggatctcaatcaaaaaaagcaatttttgctttgatgagtgtctggtttggatatgccgctgtagatatcttgttaaaatatacgagtagcttaggcctacagtttactttgactttaaatctaatttttataacggcctttgttttatcgattatttatttaatatttcaaaaaaattcagcatggcattttaaaaatacttttgctgggttaatgctaggtgtactaaatttttcaaacattgccctatacgttaaagcgcatattttactcaaagattctccggccattgtctttgcgagtatgaatattttggttgtgttacttggaatagtttgtggcgtagttttatataaagaaaaattaaaactcccaacgattttaggaacgattttgggaataagtggattggtttgtttagccttagctatgaaataggagttcaaaagactgttcttttgaactccactaaattcttataaatgtgtaaaaatcacttcatccggcagacgagattttggcaatttcgcattgaagtcattttcgcttctataacccagtgaaacaattacagagctacgcaaacctttttcttttaagccaaattcttcatttaaaacatcttcgtcaaagccacccattggagttgcatctatgccttcaagaccagctgcaaacagtagttgtcctaaagcgataaaagtttgattttccatccagccgaataagttcttttgctcattacggtaaaactcaacatagccatgacgagtatccttttgaccgagtttggctttctcatctttaaaacgaccacttaaatcatcttgttcaagtaactggtttaaatattcgggtgaaatatctgttcttgtacaaaatacaagggtgtgtgatgactcaagaaccttgggtgcattgtaggcatatcgtcctgttaaggctttggcaatgcgttctttagcagtaggattgtctgcaaccaagaaatgccaaggttgaatattcactgaagaaggggtaaagcgtaaaatttctaataacttattgaatttttcttgaggaatttttttctcgggatcgtacgctttggtagtgtagcgacttttaaccgtatttaataaatccatactttactccatatcaatcttattacaatggaagggttctaatctttggcatcatacgcgattttagagaaaaacatctgcattttaatgtgataaagaaatataatacttatataaattttttactaatttattgaaaatgtttgaattaataccaattaatcgaaaaagtaagctgcgagaaattagaattattaaagcctttctaatttctgcatttgtattgtgtcttttaattttatatatcgaatatcaaaagtatgcacatataaactggaaatttgtattcattagttgtctatgtatgatttgggattttgatttaaatagaaaaattaaagaattgaaagttcaaataaaaagtgattaatttctagctaataattccagacaatcaattcgagctgttgcgtatttgaagatggatcaatttccaaaatataagcctgatcttcacgccaatcgccaagaacaatccgctgtttatgttgtaattgatgaattgctggacggtgagtgtgtccatgaataagtatatctacatctgttagggcagagagaacagcttgttcatttacatccataatttcataacttttttgctgtttgtctgaatgacttcttttgcgaaaaccattgaccagttttgtacggaaactcaagggggtacggcgtaaaaaagcaactaggaaggggtttcggataattttttaaatttttgataggaaatatcatcagtacataacgcatcgccatgttccaaacggtattggtgacctgcaatgttgagataataaatatcaggaagtaatacaccattaaacttatctaggaaaacctgatttaaagcaaagtctcggttacccacttggaaataaacgcgattacctttttggttaaatacttttaaagcctcgacaatttcgtcgagccaaggcgctgaatagtcatcaccaatccaagcattaaaccaatcacctaaaatataaagctgtgtttgtttattttgataatgtaccaacaaatctaaaaaccctcgaacgagtcgagggtgttcaggtgacaagtgtaaatctgaaataaacagataagtcacagctttatcctaaaattattcagaaataattttagcagattcgataacaacgttttctaaaggaacgtcagcgtgataaccacggttacctgtacgtacgcctttgattgcttctacaacgtccataccttcaacaactttaccgaatacagcataaccccaaccttgtgcagtttttgaagtatggttcaggaaagagttgttttttacgttgatgaagaattgtgcagaagcagagtgtggagcttgagtacgtgccattgcaatggtacctacatcgttgcttaaaccattgtcagcttcattttcaatcgcatcacgagttgctttttctttgaagttttcgtcaaagccaccaccttggatcatgaaaccgtcaataacgcggtggaaaatcacgccatcatagaaaccgtcacgtacgtattctagaaaattagcagccgttttcggtgctttttcagtgttaagctcaagaacaatacgacctttgttggtgtttaattcgacttgaggaaaactcattacattaatctcctaaacatgggcaaattgaccatgggtttttggttgagagaagcataagcaaactgtaaactacaaggcaagtaaaaaacgttaaaatctttgtgaaaaatgaagatagcgtttattttttcgaaattttatctacaaagaagtgattgatacactatgaagcctaatgatgttgtctcgaacctgccaaacaacccgacaccgaatactcatgcctctgtcgattctgcgcagcaagaacaacaggctggattagattttgttcgccaagtcattaccgatgatttagctgccggacgtgccaaacaaatcgtaacgcgtttcccgccagaaccaaatggttatttacatattggtcacgtaaaagcaatttgcctcaactttggcgttgctgaagagtttaatggtctttgtaatttacgttttgacgatactaaccccgatgcggaagaacaagagtatgttgatgggatcgccaatgatgtgaaatggcttggatttagctggaatggcgaaccacgttatgcttccggttattttgatcagctttatgcttgggcaattcagttgattgaacaaggcgatgcatatgttgatttgcagtctccagaagaaatcaaattaaatcgtggtagctttgttgagccaggtaaaaattcgccatatcgtgatgcttctgttgaagaaaaccttgctcgttttgaaaaaatgcgcaatggtgaacttaaagagggtgaagctgttttacgcgccaaaattgatatggcaagcccgaatgtacatatgcgtgacccaattttgtatcgtgttttacattcagagcatcaccaaacaggcgataagtggaaaatctacccaatgtatgactatgctcatccattgtctgatgcaatcgaaggaatcacacattcactttgtacattagagttccaagaccaccgtccgttttatgactggattgttgaaaaagttaagtctaaagctgtgccgcaccagtatgaatcttctcgcttaaacgtagattacaccattacgtctaaacgtaaattacgtaaattggttgaaggcggttatgtgaatggatgggatgatcctcgtatgccaacggttgtgggtatgcgtcgccgtggtttcacaccagaaggcctacgtgatttctgtaaacgtgtaggtgtgtctaaaactgacggtattgtagatgtcgcaatgcttgagttctgtattcgtcaatctttagagaatacggcagcgcgcggtatggcagtgttaaatccattaaaagtaacacttacgaacttatcggaagatttagaccttacccatgctcgtcatcctaatgtcgatatgggtgagcgcgtgattccattaactaaagaaatctatattgaccgtaaagatttcgaagaagtaccgccaaaaggctttaaacgtttaattcctgatggtgaagttcgtttacgccatgcatatgtgattaagtgtgatgaagtcattaaagatgcaaacggtgaagtcgttgagctgaagtgttcgatcgatccggatactttaggtaaaaatcctgaaggccgcaaagtaaaaggcgtaattcactgggtatctgcaactaaaggtattcctgctgaagtacgtatttatgatcgattgtttacagaagctgaccctgaaactggtgatgatttcttagcaaacttaaatccagattccttgaaagtggttcaagctgtgatcgaacctgctttagctcaagcgaagccagaagatcgcttccagtttgaacgcgaaggttatttcgttgctgatcaatacgatcatactcctgagaagcctgtgtttaaccgtgttcttgacttaaaagatagcttcaagcctgagaaaaagtaagagattgattatctcttactttttctcaagacgaatatcatgtggtgagtaaacagaaaatataaaaagcccaactgtaaagttgggctttttattcaggtgtcttctcatattttctttttctttatgattaacgtccttggcaaagtagcttaggccgggttaatcacataaaaataaagaactaagatgatgaggagaacgcatgaaagcaataaataagtattgaccgtattaaagcttttaataaatttccagatatccatagtaattcagcgtatattttatgttacaaattaataatacactgaaaattttaagaaatgtttccaaagatagaatataaactttcctttgcttaaaaaataaacaattaataccaaatggtaaactctaacctttgtagatattagaaaatttctaatttaaccactatatccgattcgttttagaaacttttgaataacttcaaatgcagcatgttcaagtgcttgagcatattgtaagttttctactcgtagtttcggaattgaaattttggcattacgaagttcacatgtatggccaattaaccatttctcaaaattttcttctgttgtttcaatatgaaactgcaaggcaagaatattatttccaacttcaaatgcctgattagtataaatctctgaactagctaataacactgcgttttcaggcaagtcaaaagtgtcgccatgccagtgtaaaacatgcacattattaagcaaaggcgataatacctgattaggacgtaaacttaagcttaaggctccccagccaatttctttttgatggcctgcatatactttggcgccaagtgcatgcgcaataagctgtgcgcctaggcaaataccaagtgtaggtttatctgctgccaagcgttgtttaagtaaagcgatttcatcttttaaaaacggataatcttcggtttcataaactccgattgggccgcctaaaataatagttaaaccgtcatgtgtaaaagcaggggttaaatcatccacacctgcttcaaaatagcggacacgaaacccaagttgataaaaaacatcttctaatgaacctaggtcttcgaaagcaagatgctgaatggcataaatagttttagggaaggcgtttgttgtgttcatacaaatgatttagagaagatcaataggtggagtatagcgataaatataaagaagaaaatatccatacaaatcgtcaatacctgaaaattgctatttttcgttaagataatcttgttacgcataaatattttgtagggaagaaatatctacgcgtaactgctatttaaaataaaagctttgcgttttcattatggtcgatatttgaaagttgatgttcatcttttaaattcactcctgaaaagccaagctgtttcgattttctcattaatgccattaaacgttgtacagcaaccggaatacttaaacctgctgagcgaacatttgaaatacagttgcgtttggaatcgagacagcctgaatatgcattccatgtgtagtaaatccccatactgtcaggagagcttaaaccagggcgttctccaatcagcatgactaacatggatgctttaaaaatttctgcaacttcatcgcctaaagcaactctgcttcctgttgcaagtacaattggggcaaggctccaattttcttgctgaatatgttcacttagcgctgcaataaatgcgatagcatttgcttcaatcgctcttgcagagagaccgtcacctaccacaatacaaacatcatactgttgcgggttttctgcatacttcttaattaaggtatcttttgatggatttgaaagttggcgccccaaatctggacgtttaagataaatttctttattaggtgcattactttgtatatgaaaactttgcagctgctgctgtgctaattgctccgagaggtaggaaacatccatctcttgataaactgcatcttttgcttgcgcatgagacaactgaaactcaagtaaggcgcgtgttgggatactacaacctgcacgacccagagcaatacgggcatcggtaaactgtttgagcttttcccactgatcctgatgggtagaggatggatattgaatatcacgattaagtttcatagtgttctccctaattcatgagcagacgagagaattggtcaggcatatggtctgcccaacaaatttgagagttttgctgtttaaaaatcccttgttgttcaagccaagcggagaactcaggagcgggttttaaacctaagagttgtcttaaatagagagcatcatgaaaggaagtggtttgatagttgagcatgacatcgtctgaaccaggaatccccataataaagttaatgcctgcggcgccaaatagagtaagaagtacatccatatcattttggtcggcatcggcatggttggtataacaaatgtcgcagcccattggcacgccaagtaacttaccgcagaagtgatcttccagtcctgcacgtataatttgtttaccgttaaagagatattcggggccaataaaaccaacgactgtattcactaaaagcggattgtatttacgggccaccgcataggcacgagtttctaatgtttgttggtcaacgccgtgatgagcattgcttgatagggcactaccttgacccgtttcaaagtacatgacgttttgtccaatggttccgcgtttaagtgcgagggtggcttcatatccttcttgtagtaaatcaagtgaaattccaaaaccttcattagccagttgggtgccggcaattgattggaacattaaatcaatcggtacatttttttcagccagttgaatgcctgagctgatatgcgtaagtacacaagattgcgttggaatttgatattcctgaatgacatgatcaagcaatttcagtagctctgacaaattatgcaggttatccgtggcagggttaatgccaattacggcatcaccattgccatacatcaacccatctaaaatactggctgaaataccgagcacatcatcggtagggtggttcggttgtaaacgggtagaaagatgtccttttaaaccaattgtgttgcgaaattgggtgaccacttcacatttgctagcgacataaatcaaatcttgattgcgcataattttgctgacagcagccaccatttctggggttaaacccgatgctaatgcttttaagctttctggagtggcatcttctccaagtagccaatttctaaaatcgcctactgtaaagtgtgaaataggggcaaaggctgccagatcatgttcatcaataatcagtcgtgtaatttcatcagtatcgtaatcaaccacaacttcatttaaaaaggtttttaatggcacatcagccaaagtcatttgtgccgcaacatgttcggttgcatctctggcagctacaccggctaactcatcgcctgaacgtaacggtgtagctttggccattaacgtttttaggtcagcaaagtgatactgttgattggcgacaatattgcgataactcatagttacatccttttatttatagttcttgttctgcggctttaatatttgcaaactcttcttctggtgttcctttcactaaatgatagcggctgtagaacaaaaagtaagcaataaatacgacatagataccggcagcaataaaccacactttcggattaacaacaaaacctgcgaccacagcagcgactgctaaaactagtgcaatgcttgaagtgatgattcctcctggagttttataaggacgaggcatgtcgggtttagataagcgcagtttgatgtgggataaaagaatcagcacataagaaatagttgcaccaaaaaccgcgattaaaatgagtgaatcgccttcttttgtgagtgaaagtaagaacccgataatgcccggaataataattgcaagataaggagctttatttttattggttaaagagagtgacgtcggtaagtaaccagctcgtgacaatgcaaagatttgacgcgaataggcatagataattgagaagaaacttgcgattaaaccagctaaacccacaaagtttacgaatgtcgcaagccaagtgttggtgccataaactttaaccaaagcatctaccagaggggcgcctgagttttgtaaagtacttgcacctgctgcgcctgcacccaagaacaaaataagcatggcaaatgctgttaagatgagcattgcaccgattaaaccgcgtggcagagatttggctggatcttttgcttcttctgctgctaacggaacaccttctactgcaagaaaaaaccagatagcaaaaggaaccgcggcccagatgcccaagtagccatgaggtaaaaaaagacttgcgccaacacctgtactaactggaatatcaaataaattttgtgcattaaagtgtggaatcattgccccaataaacacgacaagggcaacagcggcgacaagtgtaatcgcaaacatgatttttaaagcttcgccagcacctttgagatgtatacccataaaaatggcgtaacaggcgaggtaaatcatccagccattaataccaaatagagattcgcaataaccaccaataaatacggcaatagcagcaggcgcaattgcgtattcaattaaaatcgctgtgcctgttaaataaccaccaaaaggcccaaaggcagcacgggcaaaactataaccgccacctgctgtcggcatcatggtggacatttctgacatagaaagacatagacataagtacataagcgcagcaagagcagtggcaataaacataccaccccaaccaccttgagcaataccaaagttccagccggcaaaatcacctgagatcacataagctacgcctaaaccaatcaggagtaaccaacccacggtaccttgtttaagttggcgctgagcaaaatattctgctgatgagacttctgcacttgaagaaataacggaagctgtttctggttgattcatacaatactcctgcgagttggtttgtatgaatgaatgcaaaagcaatgcctaaatgacgtgctttaaatattagatgacgcttttttattccggatagtaaaaatctgagagctgactgtactaaataaaaaagccagcaatttaaattaccggcttcttatataattaatgagcttgtttccttctagcgttgatagtttggtatcaacttggtgcgaaacttagaagaagcccattggtttggttgaataactcaccaacaagtttttggtttgttgatagtgatccagcatcatcttatggttttcacgaccaataccagacttcttgtaaccaccaaatgcagcatgagcagggtagatgttatagcagtttgtccagacacgacccgcctcaatagcacgaccagcacggtaagaaatatgtgctgaacgtgaccaaacacctgcacctaaaccatacatggtgtcgttggcaattttgattgcatcgtcaaagtctttaaatgttgtcacagccagtacaggtccaaaaatttcttcttggaaaacttgcatgctattgtggcctttaaaaatagtcggatcaacatagaaaccatcacctacttctttacggccactaccaccaagtaagagttctgcaccttcttctcggcccgtattaatacaacgtaagattttctcttgttgttgcaaagatgcttgagcaccaatcatggtttcagtatcgagaggatgaccagttttaatacgttttacacgttcgacggccaactctaagaattgatcagcaatactttcttgtactaaagcacgagaagggcaagtacatacttcaccttggtttaaggcaaacatggcaaaaccttccagcgttttttctaagaagtcatcttctttatccatgatgtcttcaaagaaaaggttcggtgacttgccgccaagctctagcgtgactggaataatattttcggtcgcatattgcatcaccatttgcccagtttgagttgaacctgtgaacgcaatttttgcaatacgtgggtttgtcgctaacggacggccaacttctgcaccgaaaccattcacaatattaagtacgcccggcggtaagatatcttggatgagttcggcaaccaacaaaatacctaccggagtttgctcagctggcttaatcaccacacagttaccagccgccaaagcgggagcgagcttccatgcagccattaaaatcgggaagttccatggaatgatttgaccaaccacacctagtggttcatggaaatggtaggcaatggtatcttcatcaatttcagagatgccgccttcttgagcacgaatacatcctgcgaaataacggaaatggtcgattgcaagtggaaggtcagctgctaaagtttcacgaactgctttaccgttgtcccaagtttctgcaaccgcaagcatttcaagatttgcttctaaacgatcagcaatttttaaaagtatattagaacgtgtagtcggtgaagatttattccatgaagctttcgctttgtgtgctgcatctaaagcaagttcaatatcttcagcactagagcgtggaatgcgtgtgaaagcttttccatccactggtgacacattatcaaaatattcaccctttagaggtgcaacccattcaccgccaataaaattttcatattgtgatttaaattgaacttttgaacctggttgatttggatcgatatagcgcatataaatattcctttgcttttttaggactaaagactaacaagaaccctgtcagtaagtactttcgtactttgtataattaggatataaagaagaaggttggagaaaggttggaatagaaatgtgaatatataaggaatttacaaatgttcacaaaaaaggatttattgcagcaacggatgttgattgatcaactgcgcacgcaaaatagtctctctcctcagaacgctgccaaactcggccaaagtattgcgagctcgtgggaacgatcagcttctgctgcgattcctaaagaacgatttgcagcacctctacttgaaagaaaatctgcttcacaaaatgctttagatctggcactaagccagtgttctgatgacttacgtcatattgcagagcagtcttctatggttattgctgtgggtgacatcggtagtaccattatctggacagcctcaagtgctcaaatgcagagcgctgctgaacgtgtacattttgtacaaggtggtcaatggcgtgaagaatttgtaggtacgaatgcattggcgttatctttaaaaactcaacaatcaagctgtgttttttccaatgaacattatatggagtcgattcacgattgggtttgttatgcggcacccattatcgatccctactcaaagcaaaccttgggcgtggtagatttatcaaccacatggaaaaaccataataccttgggtattttggccgctgagcgttgtgcctccattattcaatctgctttgttagaacaacagcgccagcacttacacatccgggcattttcgacgccgcaagttaaatttaacgggaaaagtttattattgacgccgcgtcaaattgaaattttaacgatattggcactatgtccgcatggtttaaccttagagcatctctatcaggcactttatggtgagcgtaaagtaagcatgggtacgcttaaagctgaaatgtctcaattgcgagatatattgggaggtttgcttggttcacgtccatatcggttacttgtgcatgttgaggccgattttttacaagctgaacaagcgcttgatgctggatatgtcgcctctgcattgcagctttatacaggcgtatttctggcaaaaaccgaaagtccgtttctgtgtgcatggcgtgactgccttgagtcgcgcttaagtgatgcgatttttaaaacacaagaaacagatttattacttaagcatttagctcattttcccgaagcaatcgatgcggtagaacgtcttatggagttattaccgagtgaacatcctgcgcatcaattgctggtgaaatatattgactcacctaagctaagttaggtgactttttgatccagccattggaatagttgctgatagacttgttcccgtactggctgggccgaaaggactaaatcgtgtaaaccattgtgaatagagactacagagacatcgcctttcatttttttcccaaatttagcaatgtctttaacgtctaaaatgacatcgctttgagttgcatcgggtccccatttgcgtgggtttttagtttggtgcgaatgcataatcagggctggaatattcaatttaacaccgcggtgaatttctttttgcgcagtatgaattgcatgtacaaagctgagttgaactgtaggggcagaggttggtttccaatcgaggttgaaatcccattcacctttaagctgcttatgaagactggtggtgtaccatttgttcagttggcttggaaatttaacttttggcagatattttcctactcgactgagcattggaataccaaacttcttttcgactaagcttaaattaaaatcgtaaaacggactattcgcccagagtgctttaatgaggggatgatcaggatgatgcgcagcataaagcgttgccgttaagccgcctgttgagtgacctgcaagtaaaacttgtgtatgtttttcttggccaataatctctaatgcttgagtaatttcggcatcatattcatttaaatcgagcacattatagaaaatttgatgaggcagttttgagcggccatattttcttaaatcgagtgcatagaagtcataaccatgggcattaaattgctcggccatttcggtttgaaagaaataatctaaaaaaccatgaatataaagtaccgctttttgagttggttgagtggcttttttacgaactaaggtggctacaactttaccttcataatcatctggaaagttgagcgttagctgctcatagccggcacctaaaatatctggggcataattgtgtttagctatagatgtattcatttttatcgagctattgtcattaagtcatgttgagtatccttcaatgaaatgggcaaattgtcaatcaggtttagagaaggttggagtataggttttaaaaaaagggaataccgctggagctaagtattccccaaaaagtaagtcaacggtcggagggatttgacttactacaggaacatagcgttacatcagtattaaagtgctgctttgaaaatctccacaacttgtgcatggtttgctttacgtgggttggtgagcatacatgcgtctttttgagcgttttcggccatcaccgcaaggtcttcggtttttacgccaagttctgttaagccagatgggataccaattgaagaagacagtttacgaatggcatcaattgcagcatacgcagcttctgttacggtgagaccgtgcgtatttacacccattaattctgcgatttttgcataacgatctggacaagcaattaagttaaattcacatacatgtggtagcaagattgcgttacatacaccatgaggtaggttgtagaacccgcccaactggtgtgccattgcatgaacataacctaaagatgcattgttaaatgccatcccagccaagtactgcgcatagctcatcgcatcacgcgcttcgatgttttcgccatttgcgacagcaggttgtaaccattgactaatcatggtgatggctttttcagcacaagcatcggtaattgggtttgccgccgtagatacatatgcttcaactgcatgggttaatgcatccatacctgttgcagcggttaaaccagccggttttgcaatcataagtttcgggtcatcgatcgcaatgagaggggtacaacgccagtccacgatagccatttttacgtgagtatcggtattggtaataatacagaaacgagtcatttcagatgccgtaccagccgttgtattcactgcaatcaatggcgtcattgggactttacttttatcgatgccttcgtagtcacgaatatgaccaccacccgcagttactaagccaatcccttttgcacagtcatgagatgagccaccgcctaacgacacaataaagtcacagccattttcgttataggcattcacaccgttgtggacattaatatcggttgggttaggttccgcgcccgggaaaatatggctcgctacgcctgcttcggttaaatagcttgcgataagatctgcaacgccaaatttaaatagcccttcatcggtcacaattaatgctttttttgcgccgaggttctgcgcctttgttccaatttctttggcacatcctggtccaaagagtgatacgcaaggaatataaaaaccgtttgtttgatctgcaatatttttaaaagccatggagtgattcctttttccataaatccattgtttgttattacaggtgagcctcaccatggccttagtattgtgatgtgtagattattttcctacctaccaaaaacctaccaaataccaacttgatattagttattgatttatattgtttttatagaaaatttggctcattcatttaaatttttcgggaaaatcgttaagctatgggctgttgaagatgtacatatgagattatgaaacaggaaactgcacttaaactgctaaaagcaggtgaaaatgtttttttaaccggttcggctggtgcagggaaaacctatacactcaatcagtacatccattacctaaaagcgcgtaaagtacctgtagcgattacagcgtctaccggtattgctgcaacgcatatgaatggcatgaccattcatacatgggctggtattggcatcaaagatcatctaactgacgatgacttgaaacgcatgaaagagcgtaaatatctcaaggaacaccttgaaaacgcgcaagttcttgtgattgatgaaatctcaatgctccatgcgaagcaacttaatctggtcaatcaggttttaaaatattttaaagaaagtgatgaagcattcggtggcattcaagtgattgtagctggtgatttcttccagttgccacccgtaggccgtaatggtgaagccaatcgtgacaagttctgttttatgtctgatgcatgggtcgaagccaaatttcgggtatgttatttaacagaacaacaccgccaagatgatgaaattctgaatcagatattaaatgcgattcgtgcgcaaagtattcaaaccgagcatttgcaagctttgcatcaatcccgtactcatgacattggcgaaacctttactcgtctttatacgcataacatggatgtcgacaatatcaattatcagcacttaaacgaaattgataatgaagggcatcaatttaatgccgttttagacggtaatgaaaaattattagaaactttaaagtcttcagttcgtgctccggaagaactcacacttaaaaaacatgccaaagtgatgtttgtaaaaaacaactttgatatgggttatatcaacggaagtttaggtgaggtgatcggttttgaagaagatgacgaaaatgggttattgccaaaagtaaaattaactgacggtacaactttgctggtagcacctgaaacatggtcaattgaaaatgaagcaggaaaagtcattgcaagtttccagcaaattccacttcgtttggcgtgggcgattaccattcataaaagccaaggtatgactttggaagctgctgaaattaacctgatgcatacctttgaaaaagggcaaggttatgttgcgctctcacgtttgaagtctttaacagggttaaaattattaggttttaatgaacaagctttggagttagatagtctggcggtaaaagctgatcgccgttttcaagaactttctaaagaagccgaagataattttgctgacgtcgatttaacggctcaacataaagcctttattcgtcattgtggtggaaccttaaatgaaactgaaatttcaagaaatgagaaaaaactagcgagaggcgagaagcaaaattacgcctcagcgactttggacgaaactcgtgcattgtttgaagaaggctacgaaattgaagatattgcacatgaacgtggtctaacacctgcaaccattattaatcacttggctcgactgcataaagaacaaaagctagatatttcggttgcccatcctggtgaagaagtggtcgaagaagtgcgtaaaatttataagaagttgaaaaaacgccaaaatccggatcatttttctgatgatggttcgatcaaactaagaccaattgttgaagcaaccagccctcgaatgggatatgatcaggttcgattagctttattatttattgaataaagtttaattggcttaatgacttattatataaattgaggtggctatgccgcacgttgtagttgattattcagataacttaactggactaaatgcaaaacaattacttgaagaaattaataccacgctcattgaaacagagttgtttagtccagaagacattaaaagtcgtgcgcgtagagatgaggtttttctgattggcttaggggttgatcaagcctatatccatgtaaaagcctatattttgtcgggaagaactgctgaacaaaaacagcttgtgggtgagcaattattagcggcgctcagcaacaaaaaatatctaccacaagagtttaataaagaaattcaattgtgtgttgagcttatcgacatgccaagagacgattattttaagcaagttgtataactctaaaaaacgcaatttcgatcaagaatagcaatgagcactatgtaaaagtagtgctatcgaatgaacagacataaatgtatggctgtatatactcaaaagctgcaactggtttgcgattatattcaaagacatttagatgaagacctagatgtcgatcggttgagccagattgcggccttatctaagtttcattttcatcgtatttttgccattcacgttggtttaaatgtgatgaagtttatccaactttctcgtttaaagcgggcctcttttcaattggcttttgaacccgatctcaaaattattgagattgccttgcaagcagggtttgacagtcccgaggcatttactcgtgcatttaagcgttcatttgatcaaactcctcgggcttttagagataaaccagactgggaatcttggcaccagaagtttgtttttacgattccaaaaagtgagctaaaaatgaatgtaaatattgttgagcgacctgctgaaaagattgcctatctatcacatttaggaagtcccgataaagttttggaaactgctgcgcagtttattgcttggcgtaaagaaactggcttatcgcctgtaactaagtctaaaacttatggtattccttttgctgaccccgatcagacaccagctgacgagtttcggtttgatatagcaggttcaattgaaaaggcggtacctgaaaatagttacggcgtacaaacaggtgaaattcctgcggggcgttatgcaaccgtaagacattttggtagccatgaccagattaaagatagcgtctattacatctttagaaactggttacctgagcaaccagaagaagcaggggattatccggttttctttcactatcacaactttgtgcatgaagtgaacgagtgcgaccttattaccgacatttacttacttttaaagtgagtctagggtgatacagacatagcttaggttatgcctgtatgtttaaaagtttgatatctgcatattgttcaatcaggttgtcatctaacatatggatataatccataaagatgctactaaagcttcccatagtttgcgcctgatttgctgcaagtttacctgcaattgcaaaatgaacatgagctgaaagagccgcaatggttggtgttgccacagcgctatatgctgcaattaatgcacccaaagcacagcctgttgcagtaattttaggttgtaaaggacttccgccgtttacttgaatcacagcatctatttcattagacaatatataatctgactcacctgaaatagcgatacagtctgcatgtgctaatagtgcataagcctgttgataggcctgatcactacttaaggtactatccacacctttagattgaacttgattgcctgcaagcgtactgatttctgaagcattaccacgaataacacttggcttgaattgtaaaagctcgtctgtcatttgactgcgccaagctaaaattgggccatagcctaccggatcaagtacccaaggaatattgttaagctgtgctgttttggcagagatttgcatggcttgcatttgctctgaagtcggtgtacccaaattaatgcttaaagccgatgaaattttggtaaagctttctgcttcataaggattatcaatcatggcaggtgaagcaccggaagcaagtaatacattggctgtatagttggcagcaacgctgttggtaatacattgtaccagcggcgtttttgcctgcatgttttgccaagcttcaatcacctgttcaatgaggttggatgtcgaagtcatctgataatccttattaagccagagataagaaagttaacgggtaaaatagtgatcttgatgtttgcaattttggcaaatcaacgacacataatctgctgcatcatagtcaacacttagatcatttgaaccacagtacatacaacgtttaaccgagtaaaagtttaaacgaggttcgatttttcgccatgctttccatacaggttgtacaaatatctgttcgtcataacctaaaaagcggttaaataatatatggctcattttactgtaaggaatattgtaagggcggggcaacatcgaagtttcccacttttcagtcaaagctcgttcccgatattgctctaaagttttctttaatagattggtattaataaacttttcatttcgtggctgtagtgccttttgtttataaagatattcaagtgcagtctgaataagataataaatttgaccaatcgccaatgagtccattaaacggtagcaaaaggcttgaaaattagagcttcctgcaatttggataccccaagttcggcaatagaactgagagaactgaataatttcttgatagagcacctgaaacagcacgtctttcacttcatcggcactacgaaatggaataccaagacttaggttttcatagaaccagtggcgtagttgctgagctacactaaataaactcgggtcgctataaccatctagacgaatatttaaataaaagcactgtggttcatcggtttgatcttgtgcatttaaaatcccatctttatgaagctgtttaatgagatggttctggaacatccagttaggggtaatcggctgatattttatctggtcccaatgaatgtattcatcatgtgcaatgtcatcacgagcatagtcatcaagtaggctgagtaaaaaaagtttatgtaaaaaacttagttgttccagactgcgctgaggttggtcttttgacttaaactggcgttgttcttgtaaacgagtttgttgtaaaagttttttccgttgtttagtgcatgtttcacaatgacaagtcatttttgtgtctttaaatacacggtgttggcaatggctacattcatgaaattgaacgtcttgctcaaattgttcggcatctacccagtacatcgacgcttggcagagagggcaatggctactttcatctagctgtttttgtagaatttgtaaggccatttcgctccgaacgtttgaattaatcatgactgacctattatacacagccgcattgccgatagatgagattgtctttttgtttgatgcaaaaatagaaaacctaaagtctttgttttgactttaggtttttataagaggttaaaagttaagattaaacagggcacggcaaggtctcatcattttgtccaagttttttggcattgatcagtgcctgcacttttttatttggtaatttcactttacctaaggcgtcatacgtattaacgatagtggttacctcctgagcagtcattgaaataccttcggcagacaagaacacggcaattacatggtggttgagtcctgctgcatctagatcatgaatcgctttaatgttttctagtcgatgtaaataagcttttaattccatagtgagttcctcttgttctgattgaaatacttatactggtatattggataaggcaagaaccatgcccaaaatgtaagcagctcctcaaaaatgttaaaagcgaaaggagttttatttttattgtatagattgattatataaacagcgattatcgtaattttggtctaatctgtgctaataaaagacgattctaatttgaaatgtataaatgaagtcccattaattttataaaggtaaacaaacacagtatgtatgaatgtgtatgatcaagttcataaaattcgtactacggtttccaaaagtatataaggaataaagatgaatattgcggcgcagcctccagttcaggcagatcaaacagtttatttaaaagattatcaaaaacctgcgttcttggttgaatcaattaatcttgatattcaagtctatgacgataaaacaattgttgattcaacattggtcatgaagcgtcaaactgctggagacttagtgctactgggccgtgatcttgagttgcaatctattcagctcaatggccaagatcttactcctgcacaatattcactcgatagtgaacaactggtgatcactgatgcaccagatgaagtcattttacaaactcaagtgattattcaccctgaaaccaacactcagcttgaaggtttatataaagctggcgacttatttgtaacgcaaaatgagcctgaaggtttccgtaaaattacgttctatccagaccgtccagacgtactttcagtttttactacacgtgtagaagcagacaaaaaatatccggttttacttgcgaatggtaacttgcttgaaacaggtgaagttggtgaaaaccgtcactttgcgatctggcaagatccaactaaaaagccaagctatttgtttgcttgtgtgattggtgatttagctgtattgaaagaccgctatacgacttcggaaggacgtgatgttgctttagaaatctatgccattgagaaagacattccaaaatgccatatcgcaatggaagctttaaaacattctatgcgctgggatgaagagcactatggccgtgcctatgatctcgacaactatatgattgttgcggtgagccagttcaacatgggtgccatggaaaataaaggtttaaatatctttaacacctcatgcgtacttgccgatgaagaatacacaactgacgcagcgattatgcgtgtacagtctgtgattgcccatgaatatttccataactggacagggaaccgtattacttgtcgtgactggttccagttgtgcttaaaagaaggcttaacggtattccgtgatcaatctttctcggaagatttacaatctgctgcggttcaacgtattgacgatgtcgctgttcttaaatcgcatcaattcccagaagatgcaggtccattgtcgcaccctccacgcccagaccactttgtcgaaattaataacttctatacagcgactgtttatgaaaaaggtgcggaaattaaccgcatgatgtcgacattactgggtaaagaaaaattccgtcagggaacggatgaatatttccgtcgtcatgatggacaagccgtaactgttgaagactgggttgctgcactctctgcgggttcaggtgttgatttatctgcattcttaacttggtataaccaaccaggcacaccaaagcttgaagcgaaaggtgaatatgatgcagcagcgcaaacttatcgtctaagctttaaacaaagcctaaaagcgcatccgaaatatccaaacttaaaagctgtcccaattcctgtagcgttggcattatttaatgctaaaacaggtgaacaatatacgctccaaaacgaaagcctatttgtaaatggtgttaaagatggtgtgtacttatttgatcaagatgaagcaactattgagtttacaggggtaactgagcaacctgttgtttcactactacgtaatttctctgcacctgtaaatctggtatttgattacagtgatgaagaattagcattcttaattcaacatgaaacaaatggttttaaccaatggcaagcaacacaaaccttgcttgaacgtattttgttagaagatcactctgcggatacctatattcaagctattcaaagtacattgcctgaattagttggtcgtgatccacttttagcatcgcgtttgtttgatgtaccgactgaaggttatttgggtagccgtattgatcaaaactatgcaccagccgatattcatgtaaaacgtgaagccttactcaatcgtttggcacaagagttgggttcgttctggaaagatacgtaccttacattggaccctgacttgcaaaaagaattttctttagcgatgggtgtacgtgcattaaagaacattatgctcatgatgatggcgcgtcagggtgatcaaagtgcatttgaattggcttacgatcaatatcaaagcacagggaatatgtctgaacgtttaggcgcgctgcgtgtactagtgtggcaaagtgcgcctcaagcacaagaagccctagctgatttctataaccgctttaaagacgaagcattgtctttggaccaatggtttatgatacaggcagcaaacccaaatgccacagttgagacaattgaatatctaactcagcatcctgattatgacttaaccacaccaaaccgtattcgcgccgtgagtggtggtttgtcaaataaccctgaaaatacatggggctttggtgtagctcactttattaatcttgcagaatatctggacgagaaaaacccgattttaggttcacgcttattacaggtgttatctcgctggtatacacttgccgaacctcagcgcactcaagtgcaacaggctttacaagcgttgcagcctaaagtgaaatctaaaaacgtttctgaaactttaaatagtatgctgagcgtttaattagattttctgaattattcatgttttcaaagcgctatttctttaaaaggggtagcgcttttttttatattttgaaacttggtcgtcatcaaaaatagtttgacttaaaaagacattctgtatatttaataattagttccaaaaaggaactgagagcaaaacaggcaattaaaaataaaggtgaataaatgtcggatattattttgcatcaatgggaaatttctccattttgccaaaaagttgcaagagctttgaaatttaagggaatcccatacgaaacgattaattacaacggcattcttggagcgaaagttcctttgctcagtaaagtgggcaaagtacctgttattgaccataaagggcagcgtatacaagacagtacccgtatcgctcgctacctagacgaaacttttccggatacacctcgactttatcccgaagacgcaaatcaaaaagcacttgcagaactttgggaagactgggcagatgaatcactctatttttatgaagtatatttaagagtaaatgattcggaagctttagaagaagcaattcgtattagcagtattggccgtcctgcatatgaaaaacctatggtgaagggttttattttagctgaactaaaaacacagcttttctttcaaggcttgggcagaatgaaggctgaaaatgttgaagaagaatttatacgacacctcgaccgtgttgagcaggttttatcacaaagtgaatggttagtgggtgagaatcaaacgattgcagacatagctgtagttgctcaacttggtgaagtcattcgtacaagtaagaagtttggtaaggaaatcttggatcgtccatttatggcagaatggtataaaaaacaaacaggttgagacgactatggcatcagcaacaccagataaaatacgagattgtgcagttgttattggcgttggggcatcacagggcatcggtgctgctgtctgtcatcgctttgcaaaagagggcttaaaagtttacgttgctggacgtactttccaaaaaattgaaacagtagctgccaaaatccatgccaatgcaggtgaagctgtggcatttcgtctagatgcagaagatatcaatcaagtacaggcattgtttgacaccatcataagtcagaatgaacgcattactgcagttattcataatgttggggggaatattccctcaatttttttacgcagtccgttatcgttttttactcaaatgtggcaatccacttttttatcagcctatttagtttctcaaagctgtttaaaaatatttaaagaacaaaaccacggtacgcttatttttaccggagccagtgcttcgttgcgtggaaagcctttttttgcagctttcactatggggaaatctgccttgcggacttatgcattaaacttagctcaaatttataaaactcaaggcattcatattgctcatgtcattattgatggaatggtggatggcgacagaattaataaagctttatttggtctaggacgtttcattcgactcacacggggaacgggtggactcaatattaatgccatagccgacaactattggatgctctaccagcaaagccctgagctttggacacacgagctagatttacgcccataccaagaaaaattttgagagactcatatgctaaaaacaatatttcagaagtttcaaaaaaagcagggctgtgtagttattgcaggtcatgatatagaactacttgaccagaactttgtaattttagacaaaaatgagcaatctccattgcatgtctatcaagctgtgcatgattctagcgttcagaatatacaagtaaaccgtggaaatgatggcataacgagtgtccgtttaaacttggtgaatactgagcatttaaaaagcttactaaaatatattgccagccatagtcataacattgagttatgcgtgtttcagccaaatttttcatctgcgccaaatattgaagctttatctttagaagaaattgagcacagttggcaaacaacgggtttaagcgcagtgagcgtgtcacaagcagtgattaaaccaatgctaaagcagcagcgaggcactgttatttttcttggagcgccatctaataactcggctcactacgatgtgttaagccaaagcatgtttgcgagtattcgagcgttatcacagtcattggcaagagagtttcagcctaaaggaatacacgtgacatattgcatggtggaaaaatgggatgggcaaaaccagcactttatttcatctgttaaacaagtctgtcagcacatctatcaacaacctaacactgcatggagtcaagagcttagcgtgtcttgagattttactttcgagtgttcttaaaatagagtactgctttggaatgacaacagaacaataattttgaaggtacttaaatgttaaatattaagaatattcaacaaacggttaaagtagcgactacagtggcagctttgatgtgcttttcttcactggcacaagcatatcaatatgagcaaaccgcgcgcttaattaacgaacgtttatcttatatgaaagatgttgcaggctataaggcagagcagcatttaccgattgaagatttaacacaagaaaagaaagtactcgatcaatcgctttctgaagctgactcttttgggcttaacagcgaaacagtaaagccatttatagtggtgcaaatggatgtggctaaagcaatccagtaccgttatcgcgccgactggttgtcgagtccggaaaccaactggaagcctcaagacttaagtgaagtacgcttaaaaattagcgctttaaacacagagctgctaaaaaatatcgcctatgaacttaagaaaaataataacaaagcgcctcatggctgtagctatatgtggcctgttcagcatcctcaacttaaagaagctgacaagagggctttatgtgtaacattgaataaaatcaaattaaaacaatgaaccacccaaagccctccctataagtaaattattcaatcaacattaaatcggcagtattggcagatttaagtggtcgtaaagcaaaggttgaacgcgtgtggcggattcctttaatcgagtagagctttttacgtaaaaaacgttcgtaatgctcggcatcttttacggccactttcaccaaataatcatagtcgcccgtaactaaatgcgcttcgaccacttctggaatgtctgccaaagcctcgctaaagttttctaacatttcatcatcgtggcgttctagggtaatttcaataaaaaacaactcatgaatgccaatcgctttggggtttacgtttacggtatagccttcaataatttttagactttctaaacgtttgagtcgagtccagcaaggcgaagatgaaagcccgacttcttcggcgagctgtgcaaccgttaaacggccatttctacgtagggcagataatattttccgatctatgcgatctagtgcgtattctgtgctgttcaaaatataaaccaaagaagattcttctgttaattttaaatatacgtgatttttatgctgatatcatttaaaaaaactgaaaattcagtaaacattttgagcgacacagccatacactatttctatgcatcggactctactggataggagttgtgatgaagcaaagagcactgtttcagtaagggtgactaaacagtgctctttgcggattttacccaaaaatcaaatattaggaatttttgattcatactttagaatcatcaaatattggttcaataataatcataaatatattcttattggtcatagcgctcatctttccaaaaatcttattaaatatcctaaatggctaaatattattattgaaatttataaaagcacatactttaatccctaaccaaagtactaatttaacaattaaatagggaagtaaaataaagattatttatttgttaaaacttaatcacctaattttaataaggtgattaaatattcgaaagagaagaaggttatcctattttctttattattaatagacacttagtgataattattatttaatacgcccgcaatattatgactaatacttttaataactttgtcggggaaataatgcgtaattttttagtaacgattttcactttattagtaggaacatcaatttatgcgagtcaagaatctagaaatcttctagagcaaacacaatgcgaaaaagcagtagagcttcatggttttttaagccgagctcaacttgactgtaactatcactattattcagaagagttaaaagaggctgccgcaaaatgtactaaacatgatctcggcgaaaaatatggtagagaggttatgaaatttgggatgaaggaatttgaagagcggaagaaagaggatacacaaggccacttttgtcataaggttttaaaagaatttccaaaatatattaaacaataaaaaataaggtattaaaaacctcttctagcaagccgataagatggatttaattattcattttatcggtctataaatttactagttaaattagaaaataattcttaaaaaattagctaatataaaacttcaccttgttttagatctaacaacaatcattttttagtttgaatcccttattgtaaccataaaaataacatttccttccttggattagccgttcgttatgtattatggaggaaaaataagcataagtcggcattcaaagtcttaattaatatagcggagtacattttaagtttacttatatttttaaatttcaaaaataaaagattctggaatggatgactaaatcttaagtaaagttattttatagagtttttaaagctttatttctagccaatatcacattgacacctaaaacccctccgattatcctttgcctgctggcctacattgccagttggttttagcagaccattagccaaagaacacgaaaaagtaatcacttttttgtgggaatccctgcgtgccccctctgcggcggaacgggagggggacaccttcgggtgtgctggattctttggctccagtctgctaaccctctttcgtttcgccaccattatttagcagtaatgtggtgaaacttctttatagccaaaggagttcgctatgcgtactaattcttctcatttattggtttttgccaaagtctttctgtctataccacttaaacagtctataaagcggttgaatcgactttaggtttttgcaccttaaaaatcgttacgactcaaaaatcatagcaacaataaacccgagataggcgagcacatctttattgtgcggcttttgcatgtctgtttttagcgctcaatttaagagtgacggcatgtctatctcttttatatacaacaaaaaattattttaagcggtataactatgccaaatttagaagcttcatttagagcacttagagtgcttcacacagcaagagatttatttaaacaatacggatttcacaaggttggtgtcgaccgaattattgctgagtctaaaattaccaaagccaccttttacaactatttccactctaaagaaagactcattgaaatgtgcttaacctttcaaaaggacgggctaaaagaagaagtattttctattatttattcataccgtgaacttatggtatttgataagctcaagaaaatcttttttctgcatgccaacctcgaagggctgtaccgtttacctttacaggccatttttgaaatcgaaaagttttatccaactgcctacaaggtggtggttgattatagaaactggttggtgatccaaatacatcaattacttttaaccattaaagccacagctacactcgaagatgcctatatgtttttgtttgtgattgatggggcaatggtccagcttttgagtaaagatagaatagatgaacgagataaattattagattattttttaataatgatgtcctagactaaaaataaaagccccgataatggggcttttataatgttagttactaactaaaatctcaattaccacttatggctataagtcacttttaacgtcacaccatttgcaactaagtgactggtattatcgcttgttcttaataattggctatatagaggatagtacttgcggttaaacatattctctaaaccaatcgtcatggtgtcttttttattaagtgcaaagctactgattaaatctgctgttgtataagattttacatcgtagcgaccaaaactattcttgccgtttaggcggtaatcttctgaaccgaagtaagtggcttgtaaacggtttgtccaagtttctgttgggctataagaaatataacctgtgagttttaatggcggaatacggaagcctgtcatgtcttgctcagcaccattttgcggtttttcacggcctttcatccacgtaacgctaccaccagttccccaaacattggcatcgtcaagatagtcaaaagttgcttcaagaccagtgactttctctttggttctagtaagtgccagaccattgctgaaagactgcacagcgcctagatcagaagtagagtggaagactgctaagcttgatgaaaagttattgaagttccctttccagcccaactcatagttatcaacttttacaggttctaaaaatgaagatgataattcataatttttttccttatcagtattatctgcattacgaataattacaccaacatcgggtaattgaaaaccttggttaaacgatgcataaatcgagtgctggtcatttggagagaaagttacattagcattgtacaaccatgcatcagcttttacttttccaccttgatatacataagggtttggcttatatgattgtgtcttaggatcaaattgtgataatggaataaaactatcaatttgggcatagctatcttcatagcgtgtacctgcttcagccgaccattggtcattaaagcgatgttttagctgtacaaagccaccaacactttgtgtggtaagttcaggtaaataaatgagcttaccagtttttacaaaatctaggccaccagattggtcataaatatcaggattgaaagtatctaaaggcatttcgcttttttcacggctaaagtcaccaccccaaaccagtgaggtgtcacctaaaaactcaagcggtgtggtaacagttaaacggctaccgagtatgttattttcttgatagatctggtctacgtttccaccccgattcggatttttacgtgcatcaaatggtgaaaaacgggtaaagaagtcgcggtaataaatttgagcatcaaccttattgccaaaaaagtctttatggttataggttaaattgtagatctggttttcgtttttattttggtctttgagctttaagcctttaatggctttggctggtacggttccggcaggggcattcttcacacttgggtcagatgcataatctgaatcttgctcggcattatagtagtttgcagcaaactggacatattggttgtcatcaatatgataaccaagcttaccgccgatgctatagccgtcagaatcatataaatcgccctgacttggttctggagcaacacggtcgccacttgcatcgtacgggctaccaatacgctgataaccaaagtcgagtgcatagtcaaaagcgttaaagctgcctgtgaaatattgatgaatatcgccacttaaagcattagaacggaaatttgttaaaggtgtttgaagtccaacgactgttttagctgtaggttcgctaccagccgcttttgtggtaattgaaataataccgccagaagcgccaccgccataaattgcgttactaccgcgaatgacttcaatgttagcaatactttcagggtcgatagctgaaagacctcttgatgtgtcacgtgtcaggttcattggaacaccatcgaccaagatgagggcattacggccccgtaaagtttgaccataatcggtaatggttcggcttgagtcggaaaggcccggtacggctttagctaaaacagttgcaatatttccagatgaaccatttcttaaaagttcaatttgtttttcatctagcttggtcacttgtttggcagatgtagaaagttcatctgcacgtgaagcgttgattgtaattgtagggagtgcttcaggctttttttcagcatctgttgtctcagaaggcgaggctgcaaaggccgagtttgagagaaagatggctccaccaagtgatagaagtggaatgatattttttgcttcagacttcctagtaaaaagtttattactttttatcttatttcccattttctcgccctgagagtgattgtaaattcgtcgaattataaatgagaatgattttaattaataatattattaatctatataatagaagtatttgtggctcttaaataaacataaataacaaagatcttctaagagagttaagagttttgattaatttaatatatttgaaaagccttaaactttttcatatgcagcattcttaaggagtcaaaatctttttttatataggtacaaagagaagcagtgacttgagataaatatttttccacctattccatacttattaatctatttattgtctagtcgaatagtagtgatcaggttttatctaaatttacgattgaatattacttccttgttgtatttatgacgacatatgtaaacaagtcttaatctataacacatgaacactttaaaattattgaaaataaagttttaaggtgtaggttttggattttttaatttttatcgtgatcttcaagctgagttaagcaactatccttggctagaaatgctagtttcgctcacacttttgatcctttttgctgcattagcaaatttcattgccaaaagaattattgttcggggaatacgtcatttagtgactaaaattaagtcactcaaccagtcagtttttgcccagcatagtgtcattaagcgatttgccaatattgtgccggccattgttattatgaatggtattactaccgttccgcatttgtcggaaaaagcggttgctttggtacagatgggcgcacaagcattcattttcctcacgattgcgctcaccattagtgaattattaaatatatttaatttaatctatcagcgtaatccaaaatctagaaacaagccgattaaaggttatttgcaactcgttaaactcattatttttgttgtttgcggattaatgattttgggtacattcctgaaaaaggatgtatttacgttgttggctggcttcggtgcaatggcagccgtattaatgttagttttccaaaatacgattttgtcattggtcgcgagtgtacaaattgcctcttatgacatggtacgtattggggactggattgaaatgccatcgctcaatgctgatggtgatgtcattgatatttcattgcacacggtgaccgttcaaaactttgataaaacatacaccacgattccaaccaataaactagtgacagacacttttaaaaactggcgtggtatgagtaatgcgggctgtcgccgtatgaagcgttctctttatatcgatcaaactagcgtgcacttcatgaccgaagaagagcaacaaaaactcaaagattttttattgctagatcaatacctcaatgccaagcaatctgagattgacgaatttaataagcatttaggtagtcagtcacgttataacaaaagacgcttaaccaatattggaacatttagagcatatgttgaattctatttgcgccagcataaggggattgctcaaaatcaaacgcttattgttcgccaactacaaccaacgagtgaaggtctaccattagaaatctatgcatttaccaataccactgcatgggtttcttatgaagcaattcagtccgatatttttgatcatctgattgcgattttgcctgagtttggcttaagagtgtatcaggcaccttcaggccatgattttcagaaattaacagtagaataaacaactgttagcgtgctatctattttattttcaaatagatagcatctttttaataattttatacattaatttataactattcttagaaaattattattaaatagctgtataagttgactttgaaagctacatgcacattgtagcttaaaagattttaagcaaactcaatctaaaacttgcaggagtaaggcttaagtaacaaatttgacactttgaacaaagaaaatactaaatgtttaaaaataacaaacaataaagttgctttactaagatttgttaggtgagttggagtgtttgaatggctacagcaattgagaacagagctagacaacttaaaaacgctaaacgtggaggatatgcgccaaccattgccaaagacgtaaacaaacataaagtacaaaaaataaggagagctctagacgaagcccggcgatatgtgagtgaactaaatgacgaaacggttatctttgacgatcaggacgcaaggcaaaaggcagaaggagccaaagcaattattgaaatgtttgaagcagctttaagcggtgcgtgagcagcatcaaactaaaacataatcataaaagaccttgctgaaacacggttaacgttctagccccttgactaggcaacttggttattcagcaaggcagtaaaataaaaataattcaaatatttctatattctattttttactcaaaaaaaccaaaaaaataccggtcaaataatattattgatgagcttaatttttttagaaaattattactaactataaaaatttttcggagttaaaatgtgatggattttacatttttattcattgctgtggttcgttatggaagtcagtttcagaacactcttatagattacatttggtatttcaacacttacatattgcaataatatattcatcatacttccctaaaagtctgatcaatcgcgatggtcaatataagagggaaggaaatatgccaaaatttctaataattgccgagaaggtttataaaaaactagaagaagataaattgttttcagataacctgatcgaacaactaaataacttggtcagtattattcgtaaagagataaagggaactccctgtaaactcaaatacaattttatcgattttgaagaatgcctaagtaaacccttaagtgaatgcacgattaaactcgacatgagtttaatgcctaaatataagaataagggtgaatatattatgtggctagcgagctttattgaaagaatcacggttggcgggcagccaaaattaccaccactttcaagtattgtgccagccgactttaacgtaaaaaaagaagctcagacgatagttgaaaataaaaaatcagtatcggaagaaaatgcaaagatgattgtgaattattttaattctgaagaatatcagaaaaataataaaaaaataaatctggtttaaaaccatataaaagtgtgtgtccaccgcacttttataatcgctggaaaatttcagcaaccgccttctggggcggttttcttttgccatatacatacttaaacaattacatcataaaaaattccataacttatctgtatagcatgttaagtttttctacacatctataaaaattacggaagggtttaaacatgaaatgttcatatcaagatctagatggaaatatagtcgaattaacatgtgaaagttatatacatataccgtcaggtgccagtggaaataaattgggaatagataatagggcagaagacttaatacatatcactgaagattttagtttttttaagaaaacagaggcagattcaataccactctatcgattcgctgtagatgctaattacaatgtttttaatagtgatgagctaccggctttggcccaaattggaaccgattggaaagtgcttaatgaataactttgcgattgttaggtagcctataagctagagctttaatattttgtaaaatttatcgaatagtaaatatttaacttatcttaatacaggtattataaatagcgaactgaaaatatagtctaaatatttataggcagttttagactagatgttgattatatagagagaaagaacatgaagcgccttattatattatttctattagcttatgctacaagctcctttgctcaagtgccattcgaagtcagtaaaagttgttttgtagtgaatggtagaaatattactgagccttgcttactttcttctacaaataactcgacatctaactttgaaagattaacttttgctaatacaaaagtttttattaaagaatcaaatatttgttcaaataacgattcatgtgtttctgtaggaagtaatttgtcgaatttaaaagatgcgactatttattatcgtgatttaaagactaaaaaaattattgaaaaaccggaaaaagattcatggacctgttttaagcaaccaattgataaattagacttttgtatttcttataattaataaaatctaattttaataaagaaaattctaaattagtcttgggcattaaatgcttcatggtagcttacatcacctttaggaacataattttgaaaacttaaggcttggaagtattcagggggcactccaggtagttttaggtcagggtatgccttaaaaccaaagcgactgtaatactttggatcacctaataaaacacaaccttttgcgcctgatttttttaatttttctaaagagctattcataagcaatgatccaatgccttgtccttgcttattcggcgcgacagaaataggtcctaagccataccaattcttttcacctgatgaaatttgcactggtgaaattgccacatgcccaacaatagtattatcttcaaccgcaactaaagagactgtaagttgtttgtgctttcttaaactattaacaataaagtgttcagtatggctcgtatgttcagcatttagaaatgccgctttagtcaattcttcaatttctttaatatcttcttctcgctcatcgcgaataaaaatattcatcttaagctctgtacacgataaaaatagataactcattgaaataatgtcataataattgttttctaacgacgaatactatgacacatctcaatgagttatatcttatcttaaacaaatatctaaaatggaacaagtcacatttaaagtgctttgcgctcatcatgcttgtgattattttaaagcaaacatgtaatctttcttctgcatctaaagccttgcccatcaagtgcttaccacaatcattttatcgacgtatgcagcgcttctttgcaggtcagtattttgattatcgtcaaatttctcagttgattttcaatatgttttcattcgaccaagtgcaactgactttagatagaaccaattggaaatggggaaaacgaaatattaatatcctgatgctcgcaatcgtttatcgtggaatagcgatacctatcctttggacattgcttaataaacgtggaaattcagatacgaaagagcgtattgctttgattcaacgctttatagccatttttggtaaagaccgtattgtgaatgtgttcgcagacagagagtttatcggtgagcagtggtttacatggttaattgaacaagacatcaacttctgcattcgtgttaaaaaaacttcattgtcaccaatcatttaggaaagaatcataaaattagtgatttatttcgccatcttaaagttggtcaaattgaatgtcgtaaacgacggattttggttggtcgggtgaaactatatataagtgcactacagttagaaaatggagagcttttactcgtcgtttctcctcagtttaatgccaatgctattcaggattatgcattacgctgggaaattgaaaccttattcagttgtctcaaaggacgcgggtttaatcttgaaaatacgcgcttgacagaccctagacgagtgaaaaaattgattgcggtgttagctataagcttctgttggtgttacttaacgggtgaatggcaacatgatcaaaaaaaagcgataaaaataaagaagcatggacgactctcaatgagtttatttcgctatggtttagactatgttcaaatggcgattcagcgtttaattggttttgggaaaaaagaagagtttaaggaaattttggcaattttaagaaggcagaaccctgataggataagggttctgtgaaatttgtcgtgtacagagcatcttaagtttgatccgtttttctcagctactcttttatttttagcatcaataggcttagttaggaataaatttcaatcataaaaacttgtataattcataaataaaataaatgaaagtaatattgataatcagtatcaaatgataattattctttgtattattcatgtaattttttaaagctacttaaagattatgcaaaggactacgaaacactttcaaattaatgcattagcacttgctatagcaatgagcacaatttcagcgcatgcagagactgatcagcagacttcggaatatggaactcttcctaccattaaagtaaaagctggaagtggccaagaaaatgaaaaaagttatatagcagggaaaacagatacagcggttccactgggtttatctgttcgtgaggttccacaatctgtttctgtcattactcaacagcgtttacaagaccagcaattgtcaactttagttgaggtcgccgaaaatgttacaggggtaagtgtcaaccgttatgaaaccaaccgaggtggaatctattcacgtggttttgtagtagataactatattattgatggtattcccaccacatatagcttgccttggtcttcaggtgaaattttctcaagtatggccttatatgatcatattgatgtagttcgaggggcaacaggtcttacatttggtgctggaaatccatctgctgcaattaatatggttcgtaagcgtgctacgagtacagagccaacagctaacgtagaagtgagtgcaggtagttgggataattaccgtgttatgggcgatattgccaactcccttaatcaatcaggaacagtacgtggacgagcagtggcccaatatgaacaaggcgacagctataccgacttgttgtctaaagaaaagctatctttattgttaagtgctgaagcagatttatctgaaaatacccttttatcgggtggggtaacttatcaggaagatgatccgcgtggaccaatgtggggaggtttacctgtctggtttagtgatggcacaaaaacgaactggtctaaaaatatcactacaagtgctgactggacacgctggaatgttaaatataccaacctatttgcagatttaactcataaatttaatgacaactggtcagctaaactgtcttattctcatggtaagcgtgatgctaattctaagcttttatatgtttcaggtagtgtagataaaaatactggtctagggctatctccttatgcatcagcgtatgaccttgaggtagagcaagataatgcttctttgcagctcaatggtagttttgatttgtggggcttagagcaaaaggttgttttgggttatcaatattccaatcaggactttacagcgtatgctcgttcaactgatacaaaaatggaaattggcaatttctttgaatggaacggcagcatgcctgagccagtgtggaatgcacctacactcaatgaaaaatataatattgaacaaaatgcactattcgctgcgacttatttaaatccgattgagcctctaaaatttattttaggtgggcgttttacaaattatgaaaagaatatatatggtcgtagttcatccataaaatatgaccacgaatttgttccttatgcaggtattatctatgatttcaatgatgtctatactgcatatgcaagttataccagtatttttcagccccaagataaaaaagactttgatggtaactatttagacccggttgaaggaaacagtactgaagtaggcctaaaatccgcatggtttgatggacgtttgaatggtactttagcactttatcatattaagcaagataatttagctcaggaagcaggggacgtcactcgtaacggggtaaaagaaatctattatcgggcagcaaaaggtgcgacgagtgaaggttttgaagttgaagtaagtggacaaatcacaccagactggaatattacagcaggttatagccagttctctgccaaagatacaaatgatgtcgatgttaatacccaacttcctcgcaagatgattcagacatttaccacctataaattatcgggcaaattagaaaacataaccgtgggtggcggggtgaattggcaaagcagtacctatattaatgccgaaaatcccaaagaagttattgagaaagtcgagcaaggagattatgcacttgtaaaccttatggctcgttatcaaattacaaaagatttttcggctcagcttaatattaataacgtatttgataaaaaatattacggtgttttcccggcgtatggccaaattactttaggtgcccctcgaaatgcggcgctaacactacaatataagttttaatgaagttattttttaagagcacctacgggtgctttttttataattctaaaaaagagctaagtatcaaaatagcactggttttcacctctattttttaccatttgataaaatttttttaactaaaattttaccgttcgtctgctaattaagataactaagtcatgaatttatatataaaaatgtgatggatttaacttaaatttatttgcttaaaaattatactaattgataaaaaatataacttggctatattccaagaacatattgcagagttagcaatatgcatttctaggatggaataaaaatgaaaataaaattatcgaaaatagtaatagccagctcattattgatatttacaaatatgagttatgcagagggagtaaaacggttttctgtctcggcaggttggttacatgtaatgcctcaaggtaaagctaatccatttaatatcaatacaagtgttaaaaatggaacagttgctaaagttggaagcatttcgccgaccagtttcttaaactccgttgatcctaatgctacagaggtagatgtaggcggtgaaccttttaatcaaaaagagtttcttgaactcgctttaaatgatgactttttaaaagggctcttacttgatgaagaaggcaatataaaacctgaggtagcaggtgaggcaacgattcaagggttagagcagtggcatcaaaatgatgctggccttgaagtagatgacacagacacattagggcttatgtttaactattacctcaatgacaatgtgtctttacaatttattggaggcattccccctaaagtcgatattaaaggccaaggtgaaatcttggcaccattaagcggtgtcgcgttgtcaccacatgaattagttaaaattctttttccgaacggcattaccttaggtcaagcagtcccgattaccaatttaggcaataaacctaaagcagctagtgttcgtgcctggacccctgcaattgaagcacaatatcaatttgggaagagtggggtgaacaagtttagaccttatttaggtgtgggtttaatgtatgctcattttaatgatattaagctaaatgacgaaattcgttctgacctgatctctgcaggtcatatgattcaaaatgtgttagatggtaaggctggggctgccttggatcgtaaagagtcgagtggaaatatggtggttaaagtagatgcagatgatgcgattgcacctatatttactgccggctttacttatgattttaatgattcttggtatacagttgcctcagtatcttatgcaaaactaaataatcgaacaaaaattgatgtcattaaccaaaatacgggcgctcgcttaattcatgggtcaactaaagttgatattgatccgatcattacatatttaggggtgggctacagattttaattttttaatcatttgaagcagtatcctgaagatgaattcaataaactaaaatctttgggatactttttcattttacatttctttgtgaacactacaaaaaagtctataaatctatgctgatcgtaatattgatagccagtatttataagctaatcaattaaaactgtatgaggtgagatatgactaaaattatcgctaccctaggtttagcagcaatcgtttcgctttctgtagcggcttgccaaggtgagaatgatactaaacagcaagataaaaccacgactccacactcaatggataaagactcctaattcttataaattttaaagcctatcgttagatgggctttaaaataactttgctgtgtcttgctattcctagctattgttagggatcaaactaatcttgcgttaataagacagccctacagaaaaaatatgaatcttcttttatatgtgccagttggtttccataacttgcattgaattaaatacggtttttataggacatgtacttaaagccactttgataaaatgactcattatggccattaccataaatttcggttgtaaaatttaaaggctgataagttaattttaatgacactcatttttgaatagcgatgaaataacttacaaatccaaacgctactcatcaaatctatacataaagttaaatttaataaaaattatctttcttataataatttaaaaataattttgaggactaaaaatgaaaaaaagcattaaaattttattattatctagtttgatttcatctataccattatctgtaattgctaaaaatgttgagactaaagtaagctttttaaaaggttcttctcaaactacattaaccggaaagtttcaaggttatgatgatgtaagatatcgagtttttgcaaaaagtggacagattttaaaatttaatattaatagttatggtaatttagcttatattaatattttcgctccaggtcaaaagcctggtaaagataagccattattcgtgggttcgactgtaggtttttcaggtgaagtaacgctacctgtcgatggtgattatattgttcaagtttatcaaatgaaaaaaagcgcacaaagaaatagagcagtttcttttaatctagatctacaaatattagataataaaaaataaaatgataattaaaagatttatataaaagctctaatagttagagcttttatataggcataaaaatagcgtagtgttaatttaaataaattgaatcaacaatcccgcatttttcaacaaaacttaaatcatgtgaaactaatagcacagaaccttcataactagaaatagcatttgcaaataactctcttgactcgatatctaagtggttttctggttcatcaagtaataaaagttcaggcataggctgagcatggctcaaacctagtaaagcaacttttaacttctcaccaccactgagttgagctaagggatatgtgcttttatcaccacgaatccgaagttgacctaataaatttctccactctaactcagaaatatttgggttaatatttcttaagttttcaacagcagagagatggtctaataaaaagctaaagttctgatcgagatagaagcaatttgcaaacagtttaatttcatctgtagcagttacagcagattgatcaatctgtttcagcaaagttgatttcccaataccatttcggccaaccaaatgaatcttttgacaagctcttaacgcgagatgaattggttgttgtgtcccatagttgagttttaagttatcaattctaagaatttctcctgttcttttgttaaaagagggaaatataaattgttggggcttaacagtttctagaagtacttttttactattaaagtcttgctggctttgatcgatttgacgctgatgttgagaatgaattgctcctaggctttgcccagcctgttcttttttaaaatcgagcaaaattttagcttgcgagtttgagtcacgaagtttgttgccagcacgctcacgtttttgagctttcattaaaacttcatgctgcttttgcttcatgtgcttaacttcacgttgatgctgatgtactgactgttctaaagcctcgatttgggactgatattgcgcataaaatttttcataatttcctgtagtgtgctgtaggccatgctcatttaagtgataaatatggtcgacttcatttaacaaagtcagatcatgactaataataagagcgcctactggatgtttctttaactgagcaattaaccactgtctagcttcttgatcaagatggttgcttggctcatcaagtaataggtaatgatcagtttttaaaaataatgcggataaggctaacttggttttttggccttcgctcaactgcttaacaggaaagtctaaatcggttggtagctgagcagatcgtagtaaagcttcccaaatattaggaagatcccaatgtccttctaacaaatcataatcatcgtatcgagcttcaccttgttccactctttgaaaagcgttgtaaagatggttgacctctaaagcttctgcaattgtgtctgattggagacgagtgagctgagataaatatgcatggtttgtttgccagtttatttgaccacttatatgcatttctgtagtgggtgaaatcttgtgaagcaattgcataagtaaagacttaccttgaccattgcggccaattaaggctgatacttgatgatgctcaagtgagaaattcaattctttaaacatcacttttgaaggaaactccaaagtgagttgtgatattacacatgcctgctgagtcataagaacctcataaatacaggatgtacaaaataggagtttaaagctttaaataaagacgctaagtcactaaagaatagtctattttgcacatcaaaaaagagaaaattgatgagaaaaaagacttacttcattggcgtgactcacaaaatagagggaaagagaacaatagtgtataacggtttttaagctgtgtaaaacttatgcattttttatgataaaaagcctaatcaatggattaggcttttagtcgactcagcaattattcttttaccaccaaaacttggattttagtgctgtttagaacatcttgcgcaaaactacccaaaataagtttttggaaacctttacgaccatgtgaaccaataacaatcaggtctgaacccaactcttctacagctttaaggatgccatcagatgagatttcaccttgaataatttgtgtttcaatatcaacaccttcttcagcacatagggcttttactttcgcaagtgttttttctgcattagcacgcgcttcaacaaaataatcttttacaacaggagagatgtaatagaaatcaacaccactaaacgggtccactgcaactagactaattgctgtaagtttactaccaaaagctttagcgatatgggcggcttgtcgtgctgctgccaaagaaatctcagaaccatctacaggtacaataatatgtcggtaattcataatgttattcctcttatttacaagttgttatatgtatgaagcttttcttacttaaagattaacacatttgtttaaaggtagaaatcaattcaattcacttgtagttaaattaaatggtatttaattatatatttgatttttaatgattttattagaggttgtttaagagggagttgagactatgccaaatttaattttttagaagaactttacaataaattacctttcatatttttgtcacacagaaatcgtataaccgaatcatatgtaagggggaagtagtaaaatatggccgatttaacagcaaagaaagtcagtaaacttatcgaggaatttcgccaaactggtaaagagccggaaaagctagtaattggatataaaacttatgcaagactcatggcagatgataagtttgcagaaaaagttgttccttcgttagaaaactcaaaagatcgattatataaaaatctaaaaataaaacttattactgaaaaacattattttgaagttaaataaaatataaatgtgatatttatcacatttatatttttgttgtttacatttagtaggaattattaacatattgtttttaagttgatacaaatatggggtgtaatcaacatttgaaaacagcattcctttacagactcgatagaataaattgcttttatttttaagtagtggaataaattgaatgccaagtattagtgtaattttattttatattttagctattttaggcttttgctctgctgtgggaggattattaagtttaagcatgtttttaatcatcatcggtattgggcttatttgtgcagcttttttgctaaaaaaagaatttaaaattgatgttttattctggaaataatcattggttataaatgattaaattaataaatataattagttctcacctcatacaaatgaggtgtaatttaaatattttaatatgatatatattattttaacttaaattgatctggcttttattttgcaaaaatcttattacaattctaaataaaaccggaaattaaaaaatacattaagtatttaaaaataaaaagatttcaattacgatgaaagaccaataaattagttactgtggcattaggtaaaaaataacaaaagcgaggtgaacacatgacctataaatatgaatatgcagggttttggttaagatttggcgcaatgatcattgatactcttattctttttttagcaattattccagccgcatggatcttttatcatggagattacgatctgatatttgctacaggtatgagtagtaaaccgcaaaactattggtttgatatgatcgtaaattatgcatttccatttttatatactgttttgtgttggatctactttgcagggacaccaggaaaacgtctaatgcgtttaaaagttctcgatgaaaagacaggtaataagttaactttcatacaatctctcattcgctatatcggatatattccatctattttagtgttttgtattggtcttatttgggtcgcatttgatgctaaaaaacaaggatggcatgacaagatggcgaaaacagtggtggttagagaactatgagttatagtcactgatgaattaataaaaaattacaaaaaaaatcttgtgccttgtagagtaaaacctatacttgccgcgagtttatttaacggagatcctaaatgggtagttgttcgaggttcgagtttaattatcaattaaaccaaagccaatactgagcaaggtaacctttaggagaggctatcttgcaatgagatagctttgttaaaaattagattaaacctatacaaattacttgatttgtaatcattcacttcagcatttatctgtttagtttctcgctagaaatggggagaagccaatgtttttatacgcttccatacacgaccgttatatctaccagattttaatcttggtaaacaattcgtctcatgcgattcaaagcattcggaccatgttcagttatgtgacattccgtcaacgttggtctggctttgggctaattttctcttcttcatcgtaagtctacgatctcctattcctttctaaattaaaaaatttaaaagactttattttcaataaggtcgagagctttgtacgcctaaaaaatggaggatttcgtgatgaaattctggcaacgactcttcacatcatttttacaaagatttcatttgatgcgttttttcggtcgtaatcgatcttttaaagagctacatcaatctagttatgctcaagaaattagcaaaaatttatctaaacgtttgcttaatgcatcaagggctcaaacgaatgatctattaaaacaattcgatactcatttgacggggcttacagaagagcaagcgcatacccaacaaatgacggtggggcttaatgaagttactcatgaaaagccattaacttggtggcaacacctttggtattgctaccgtaatccgttcaatattttacttagcctgttggcattgattgctttctttaccgatgatctaacgggttcaaccattattagtgtgatggtaattctttcaacactacttcgttactggcaagaagcaaagtcaaatcaagctgcggatgccttaaaggtaatggtgagtaatactgctactgtattgcgccatcaagtcagtgcagaagatttagaacttatgcatgagcgttatggcattgatactaaaaaccaaaccactcaccaatttgaaataccaattcagtatttagtgccgggtgatgtgattttattatctgcgggtgacatgattcctgcggattgtagaattttgtctgctaaagatttgtttgtctctcaagctgcaatgactggtgaatcaatgcctgtcgagaaatttccgttgcagaaaaatcttgaagaaaccagcgctttagagctagataatattgtattcatggggaccaatattgtttctggttcagctcaggcagtggttttaagtacgggtattcaaacatatttcggtgcattggctcatcgagttacggctactgatcggagcacgactgcatttcaaatgggtgtcaacaaagtaagttggttgctcattcgctttatgttggtgatggcacctgttgtacttttcattaatggcttcaccaaaggcgattgggccgaagcatttttattcgcattatctgtagctgtcggtcttactccagaaatgctaccgatgattgtgacttcaactttggcaaagggcgcggttttcttatctaaaaagaaagtgattgttaaacgtctagatgcgatacagaactttggtgccatggatgttctatgtaccgataaaactggaactctgactcaagacaaaatctttttatcccaacatattgatgttcaaggcgggaaatcagactttgtactcatgcaggcatttttaaatagttattatcaaacaggcctaaaaaatttgcttgatgtggctgttttagaagctgttgatgatcagatcaaaatacagaagttacgttacaagaagttagatgaagttccttttgattttgatcgccgccgtatgtcagtcgtggtacaaacgcctcaacaaaaagcccgtatgattaccaaaggcgcagttgaggaaatgttaaaggtttgccgttatgtcgaggtaaatggcaaagtagagcctttaacaaagcaatgtgaagtagcaattgaggcattaactcaacgctataaccgagatggtttaagagtggtggcagtagcgtatcgtgagtttaaaaatcatcaggaaaattattcagttgttgacgaaagtgatctgattttaataggttatattacttttcttgatccgcctaaagagtctgccaaagaagctgtacagagtttacatgcccatggtgtaacggtaaaagtgctgactggggataatgagtttgtcacccaaaaagtgtgccgagaaattagcctgaattatgatcaagttttattgggcggtgtaattgaaaccttaactgatcaacaactcaaaagagcagtagagcaataccacatttttgcgaaattaagtccggttcacaaagaacgtattgttgagcagttaaaagcaaatggtcacgtggttggtttcttaggagacggtattaacgatgccgctgctatacgtgctgccgatattggtatttcagtagataccgcagtagatatcgctaaagagtctgcagatttaatcttgcttgaaaaaagcctgatggttcttgaaaaaggtgtgattgaaggccgtagaacttttgccaatatgctgaaatatatcaaaatgacagcgagttcaaattttggtaacgttttttcggtacttattgcgagtgcttttattccatttttaccaatgctgcctattcacttactcattcaaaacttactttatgatgtttcacaaattgtgattccttttgacaatgtggatgaagagttaattgcaaaaccacagcgttggcaacctgaagaagttggccgctttatggtggtgtttggaccgattagctccatttttgacatgattacttttgggttaatgtggtttgtattttcagcaaatactcctgaacatcagacgctattccaatcaggctggtttatggtgggtttacttacccagacattaattgtccatatgatccgtacagctcaaattccatttattcagagtcgtgccgcgactccattattaataatgacagcggtgattatgtgtatcgggattttcttaccaatgggtcctttagcaagctatttaaaactacaagctttacctttaagttatttcttatatttacctgtaattttaggtgcttatatgtgtgttactcaatgggtaaagaaaatctatatccgccgttatggctggcaataaaacaataggtgcaaaatgaaattgcaatttctacaacatacagacttatcaaatattattgatactttaattagtctctcggctgcttttattttaggggcgttaattgggttcgaacgtcagtataggcaacgtacagctggtcttcgaacaaatgttctagttgcggtaggtgcagcaatttttgtagatattgcaattaatcttactggagcagatggagctgttcgggtaattgcctatgttgtttcgggtattggttttttgggtgcgggtgtcattatgcgccaagaaggcaacatccacggtttaaataccgcagcgactttatggtgttctgcggcagtaggtgctgccgcaggtgctgatttaattattgaagcaatattggcgacagcctttattttatctgccaatacactattaagaccgattgtccatatcattgaccgtcgtccgttagacgatgacacagaagttttacatgtaatttacattatatgtgaccgaagtcagagcaaggtcgttatggatgaattaaacctaaccttaaagcatcataattatcctgctaaagatattgatgtcacaccttttggagaaaaagaggttgagatagaagtaacgctaattgcaacttcaattgaagcagaagaagcacaacacatcattaatcacttaaatgcaatgccgcaaatacggcaagcattttgggataaaaacacaattaattaatttaacgagagtttgcgcttaattttttatgaatttctctaaatgatgaagcgcaaactctttcgtttaagccttattttttagctttaaatttaaggactataaatacaacaataccgacaatcagtccccagaaagctgaaccaacaccgaaaaattggatacctgatgcactacataaaaaagtaaataatgccgcttcgcggtcttcaactggaccaaacgctagtgcaatgttatggctaatggtaccaagtaaggcaatgcctgctaacgctacaataaaaatatgaggaaaagacatcagcaagcttgtgagggttgcagcaaatagccccatcaacacataaaaaaagccacagcttatacccgcaatataacgtttgcttggatcaggatgaacttggtcatctaagcttacggcagcacttatcgcagcaatattaacgctgtaacatccaaaaggtgcgagcacaacttgagttaaaccagtccaaccaatcagttgattaacatgtggtttatagccataactcttgatcatggctataccaggtaaatattgcgacaccatgctaatcacaaaaagtggtaatgctaagcctaaaagtgctgaccagctaaattcaggactaatccaaacgggtttagccaaggaccactcaagagtaggcatatgaaagtttaaaaagacagggcagagggcaatacctgccaaggcggtaaatacaatgctgtaacgcggccataatctttttgtaatgacataaatagcgagtaaagataaaacaaatatccaatcattttgcaagctcgcgaaaagcgaaatcccaaacttaagcaaaactccggcaagcatggcactggttaagctttgtggtatataggaaagcgctttttggaatatacctgaaaagcctaaaatcgcagtaagtaaaccacctactaaaaaagcgccaattgcttcatttaaactatagccactacctgttgccataattaaagcgaggcccgcagttgaccaagctgttgctacgggatatttaaatttccgagaaaggatgagtcctgataaaccaatacctaagcctaaagcccaaaaccatgaggtgatttgttcagatgacgcacctaaagcttgagcagcctgaatcactaaaatagctgaaacactaataccaataagaaaggtaataaaaccagcaaatacggctggtattgagaaatcttgaagaatcttttgcatagctaaatgttctaagtccctgaaaaattaatatgtttctgcctatgttttcagctaggtaaatctaacaattttttttaagaaggtgctttctatttttgactttaaaatgaaagaatattttttaaatagccattaatgatattatttatttcataacaaacggtgaatttgggatattgttttatggatgagcaggctgaaaatttaacacctcttgaattgaaaattatgcgctgtttacaagagaatggacgtttaagtaatgctgaactggcaaaacttgttggcattagtacttcgtcatgttggaaccatactcagcgtctttttaagattggggccatcttggatgtgcgtgctcgaattaatccgggtatggtgcaacgtgagactattgttttggtcggagtagtgctggatcgctcgacacctgatagctttcaggcatttgaacaagcagcaggtgatttggagaatgttctagaatgttacttggttgctggagaagtcgattactttctaaaaattcgtgttaaagatttggctgcttttaaccgttttcatagtgaaaaaattattgccttacctggggtaagacaggtaagaacattttttgtgctcaatgaagttaaaacagatggcatgctggcattttaacaacctaatagattctgacttccttgactcggcagcttacattgttgaagttgccagctttaaaccaaatccgaaaaataaaatgccaactaagaaaattccgcttgctgcaattttatggttttgtttgaaaaaagttgaaagtttaattccagagaaaataagcgcagttaaataactaaagctaataatttgtaaaatcaccgctaaaattaaaaagcttaaagctggataggcataatccggttcaacgaactgcacaaagaaagacaggaaaaataaaatcgctttagggttgagtaaactaatacttaaggctgttttataagggtgaactttatctaaagcaggtaaatcagccatttctgcttggggttgattacgtaatttccagcgctgaatgctgccttgtaaaagcttaaaacctaaataagacaagtaaagtgcgccgacgagtttgagtacgataaaaacccaagggaatgcttttagtaaagaagccgcaccaagtacagtacagagcattaaaattaagtcaccagtaaaaataccaagtgcacccatatatccggttttaataccatagcgtgaagcaatagacatcacataaagagaattgggccctggcaataacacaattaggaatgtaccaataatatatgttgttaagtctgttatgccgaacacgataaacccaataaaaaaccgatttttgtcatgataacaaaaatcggtaattttgtatgaaaagtgcagtttttaagatttaatttctgcatcaattccaaaagattgacgtaataaaagacttaattgatctcgcgctttaataaagccatcaacaccaccttgtaaaagttggaatgccattaagtcatggttaagttcatctttaaaactttgctcatcttgagctggtctaacaatcgcttctgcctgttttgctttgtttgcatcaagtgctgcatcgactgtacgcgtatcttgttcaagctgcgttagcaagcttggagagatcgtaagcaaatcacatcctgcaaggccaagcacctggtcgatgctacggaagctcgcacccatgacttgagttggaatattttgctgcttgtaataagtgtagattttcttaactgaaaccacacctggatctttctcgattgggtaagaatctacaccttcagcttttttgtaccagtctaaaatacggcctacaaaaggtgagattaaagtaactttggcatctgcacacgcttgggcttgatgtaaaccgaaaaggagagtgaggttacaagcaataccttcagcttctaacactttagccgcttgaataccttcccaagtcgatgcaattttaatcagaatacgtgactgatcaatcccataacctttataaagctcacataattcatgtgctttttgaatggtcgcttcggtgtcatatgaaagtgcagcatcgacttctgtagaaacacggccttcaatgagttttaaaatttctacaccaaattttacggttaaaatatcaatggttctttcaatcagttcatcatttttatagccttcttctttggcttgataataagcatcttcaatgagctctttactttctggttgctctgctgcagcggtaattaacgaaggattcgtcgtagcatctaagggacgaaatttacgaattgcttcaaggtcgctactgtcagcaacaacggtcgttaatgtttttaattggtcaagtgctgtatgagtcattgatattcaacatcttcaataaaaaatcttatgttttctttatagcacaaactctatccatactgtcgatatatcaattgttatgtttcaaagaaaaacgtttaggttctgcatctaaattgaaatgattttagggagtcggttgcattcgcttattacgaatatagtcaatcaaaaaccgtgcagcagcaccgagttcactttcgcggctccagaccaaatcaacgtaatattcaaatcgaggtgtaaaatcaaatacatctaatgctttaagtttattgtttaactcaggattttctttaaacatctcttgcggaagtacgccccaacctaaattacgtaaaatcattaagcaagcagagtggtggttgtctgtacgccagtaatgttttgaaaataataattcgggttttaatgtttcatctcgacttgccaccacaatttgtcttgtacctaaaatctgctcatatgaaacatgctcttggcttgcgagcggatgggtttttgaaataacaggaattaaggcttcacgtttgagttcaacaaactgttctctattgtctaaatgctcacgttcaaacataagggccagttgggcagatccatctaacaacatttgaagcgcatcttcttgaggggcagacacaatattaatttgtagatcgggaaagcgactttctagcaggcaaacatagtcggtccaattggtatgtagcagctcagacaccacaacaatagtaagattaggttccagcccagtacttaatgcatgcgcgtgctgtttccattgattcatttcaatcaatagttgcgccgttttttcatatagcactcttgcttcggctgttggggtaggttcacggcctttacgctcaaataaagtcaggttcaaatcgatttctaaattagcaatcgacatactcacagcagaggggactttaccgagtttccttgctgctgctgaaaatgaacctgtttccataacggcttggaacatgagtagttgttcttgattaatattcatctgtcaaaaaaaatgaaagaacctgattggattaatcaaaattataaaaataaaatgcacattatccaagttattattgagtatttaaaaatgttgatttccaagagaagactcattcatgcaatcagttatgaaggaattttgttggtcatcattgcgattgcattaagttttatttttgacatgccgatggaagtgaccggaacacttggtgtgtttatggcagtggtttcagttttctggaatatgatttttaaccactatttcgaaaaagtagaacataaatttaattgggaaagaacgatctctgtgcggattttacatgcgattggttttgagggtggtttgctgattgcgactgttccaatgattgcatatatgatgcagatgacagtgattgatgcatttattttagatataggtttgaccttatgtattttggtttatacctttattttccagtggtgctatgaccatattgaagataagtttttcccaaatgctaaagcagcatcacttcattaattcacatagattgaaatgaaataagcacccagatgggtgcttattttttggtcgataaatagaaattatttttctacaatcgcaaccacaccttcaccgcctgctgtacagatcgagattaatgcgcggcctgaacctttttcattaattaatttagctgcagtagccaagatacgaccaccagttgcagcaaatgggtgacctgcacctaaagatgaaccatttacgttcagtttagagcggtcaattgaacccaatggtgcatctaagccaagacgttctttacagaatttttcatcttcccaagcttttaaggtagagagtacttgagatgcaaatgcttcatggatttcgtagaaatcgaagtcttgaagcttaaggttagcacgcttaagcatacgaggtactgcataagcaggagccatcaataagccttctttaggcccgctcttaccaatgaagtcaacagctgctgtttcagagaaagaaagataagctaaaacttcatgtccgttttcttttgcccattcttcagaagcaagcaataccacagaagcaccatcagtcaacggagttgagttacccgctgtcattgttgcagtttcgcctttaccgaaaactggttttaacttagcaagtttttcaactgtactgtcaggacgtaagttgttgtcacggttaagacctaagaatggagtcattaagtcatcaaaaaaaccacgctcataagcagcagcaagtttttgatggctgcttgcagctagctcgtcttgtgcttcacgagtgataccccattctaatgcagtgattgcttggtgctcacccattgaaaggccagtacgtggttcaccattgcttggtgcatcaagaagctttttaaaatcaatctttgttagagctttaagacggtctttacctgttttagcaacattaagctcaagtaaaactttacgtaaaccatcacctacagcaatcggtgcgtcagaagttgtatctacgccacctgcaatacctacgtcgatttgaccaagcgcaattttgttagcaacaacaaatgctgcttgtaaacctgtaccacatgcaatttggatgtcgtaagcaggagtttcaggagcaagatctgtgctcaatacaacttcacgagtcatgttgaagtcacggctatgttttaaaacagcgcccgcaacaacttcgccaatacgtttaccttgtaagttaaagcgctcaaccaaaccattcaatgctgctgtcagcatgtcagaattagacgctttaaagtaggcagtatttgaacgtgcaaatggaatacggttgccaccaaggattgcaacgcggcgaacagtgttttgactcatggttttatcctgttgaacagaagttttggtttttgttgcttttggtgctgcagctacatttgaagatgtagacggggttgctgaagcagcgctcttactacgagggctacgtgcaggtgcagtcgttgaacgagtacgtgtcgtttttggtgtattagttgctgctttaggagtagtgctgttatgcttagccgtgttagaagccgactttgatgtatttgacactttttcctgagcagaattctcgactgctggattttcttgagttgttttgctcataaggcttttccaagcataataacgatattcttgttagctaccttaacacaattcaaatagacctgtattgactagaatgacattgtagatagcattcaggtcaagacatccaaagatgaactcaagtatgatttggagtaactctaatgaacgactgctttcatattgtttctatccatctcataacataatgaagcctgtcgtagaaaattcatttctttgagagataataatcatgactgatcaataccaagcatttacgcaatctcctattggtaaattcgttgttaaaaatctgggtttaccttcgcctgttgtattagagcgttttgaaagtgctcagccagtagtgaaaggtgcagtattggttggcgcggcgccatcaagcgttttgtctggtgcgattgcacaagtacttagcaatattcatacagatagctatgtaggcaataatgttgcattacaacaagaagctgcaaaagttggtttaaatttacgtccattcaatgcaggcgataaagaatcaaaatttaaggctgttgtatttgatgcatctggtattcaaaactcagaacagttaaacgaactttataaattctttaatccgattgcacgtcaagttgcgacttctggtcgagtgattgttattggtacaacgcctgaaactgcgaaaactgtaaaacaagcgattgctcagcgtgcacttgaaggttttatcaaatctgtaggtaaagaatttaaaaagggtattactgctcaagttgtgtatgtagacgaaggtgctgctgcaaaccttgaatcaacattacgtttcttgctttctccacgttcagcttatgtatctggtcaagtgattcgtgtttctaaagcagatgtggttgatgttgattgggcaaaaccacttgctggaaaaactgcattagtaactggtgcaagccgtggtattggtgaggcaattgcacatgtattggctcgagacggcgcgcatgttatttgtttagacgtaccacaacaacaagctgaccttgaccgtgtagcagctgacattggcggttctacattggcaattgacattacagctgctgatgcgggcgaaaaaattaaagctgctgcggcaaaacaaggcggtttagatattattgttcataacgcaggtattacacgcgacaaaactttggcaaacatgaagccagagctttgggacttggtaattaacattaacttgtctgctgctgaacgcgtaaacgactacttgttagaaaacgatggtctaaatgcaaatggccgcattgtttgtgtatcatcaattagtggtattgctggtaaccttggtcaaaccaactatgctgcatctaaagcaggtgtaattggtctagtgaaatttactgcgcctattctaaaaaatggtattaccattaacgcagtagcacctggctttatcgagacccaaatgactgctgcgattccatttgcgattcgtgaagctggtcgccgtatgaactcaatgcaacaaggtggtttacctgttgatgtagcagaaacgattgcatggtttgcatcaactgcttctacaggtgtaaatggcaacgttgtacgcgtgtgcggtcaaagcttgttgggcgcttaagcacttttagctaaataggggtgcttgtgcatcccttttttattcaagaatttataaattataaaaggttaggtatgaatactcgtcattttagccagctaccaaaagcggcattggcttatccaaaagtagtgcaaggtttaatttttaaaaaacctaaaggcccaaaaatcttaccgcaagttgaatatgtggtagatactttagaaattgatcagaaccatctcaaagcttataacgaagtatgtggctttcaaaataatggctttgtaccagcaatttatttggctgtgctttctcaaagcttgcaaatgcacatgatgacagcagaagcctttccatttccaattttaggtttagtgcatatccgtaaccagattaaacagaccagaccgattggcgtaactgaaaaactcactctgtcatgtaaatttggggaactaaaaccacatgataaaggtgttcagtttgactttattaccacggcaaaagttggcaacgaagtggtgatggaaggcttaacaacttatttatctcgccaaaaagttgagaaaagagtaggtgagaaagccaaagaagaacaagcgccatcttatgttccaaaggcagagtggaatattttagaaaacacaggccgccgttatgcgaaagtgtctggtgattttaacttaattcacattcatgccattactgcaaaagcatttggttttaagcaagccattgcgcatggcatgtggagcaaagcaaaagctttagcgaaccttgagttgccaaatgcttatgaagcagatgtgtggtttaagctaccaatgttcttgccatcaaaagttgagtttttaactgcaaatgcagataaaaagacagatttcttgattcgtaatgccaaatcacaaaaaccgcatgttgcaggaactgtaaaagcattataaaaatagcagcagcctgaacagaggtttgggctgcttttgagcaaaataacaaaaaatgcaaggaacttcatgtgattaaagaaattttactggccgatacccataactatcacggtattttagatgaacgttttattgatttagctcaccagttcagccgtcttcaagatgctagaactggacaaggtggagctgcattagcggtttattttagaggccagaaagttgtagatatttatacaggtctcaaatcacaaactgaagcttggcaacccgatactttggcagtttgctattctacaggtaaaggcgtacttgcaaccttagcgcatattttagtaagtgaaggttttttagaatacgataaaccgattgcgacttattggcctgaatttgctcaaaatggtaaagagcaaatgactttacgtcatgtgctaagtcatcaaagtggtatgtttgatgttcgaaatattatcgaaagtgcgagggaaatgctcgactggtcacatatgttaaatgtgattgcagcgactaagcctagattccttgccggagagggcaatgcttatcaagctttaacatttggctggcttgtcggtggagtacttgaaaaagcaactggtcaatctttagatcagctcatgcaaaaatatctcgttgagcctttgcagttagacggtgcttattttggtacacctgcaagtgagctagaccgtgtagcacgtttaattattcaaccaaaacctgaaaaaccagcggctccccaagttgaaaaacctaaaaagcctcaagcacgcaagagttcactctctgaaaaaatgattacgtggactggacaagacccgcaagattttcaggatgccatgattccaaaaggaatgaagcattttagtttctttagtgatgaagggttacaagcagtcattccggcagcgaacgggacatttactgcaaatagccttgctaaaatttatgcgatgctagcaaatcaaggtgaatgggatggacagcaattgattcgcccagaaatatttaaagaacttagtactattcaaagttatgcacgtgatcgtgtcatgccaataccgatgaattggcgcttaggatatcaccgcattattactatgggtaaacgtgcaaaaaatggctttggacatattggttacaatggttcaggagcgtggtgtgatcctgagcgtgacctcagctttgcttatactcataacttccagattggttcaatcacaggcgattatcgtttgtgggggctgacccaagaagctttacgttgcacagaccaaattttaaaaggccgtaaaggctggttctaattttagtattttaaagctggtatttttaagcaatgccagctcaacatttataataattctaggcgaataattgcttcggtatgacgcttaaaatcttcttcaactaaaccttgtaaaccaagtttataaatcccttctaatccacacacaaaggcaatgagtcgccacgcaatatctgtggaattagacctatttttaaattcgccttctttttgaccgcattcaatcgattgcacaatagcttgatgccaactttgcatggcgaggttatacgctttttgtatttcaatatcttgttcaattaagagttcagcttcattccataaacgtaagtagggctgaagcctgtctatattttctgcacctaataagatgaagagtctttgaaattggctagttgtttggagagtttgttcaatttcatcaagctgttccatcagctttaaaaaagcttcagcttttaaatgagatgccgaagaaaaatgatgatggacttgtccggtagaggtttgtgcttctgttgcgattcgacgtaccgtcatggctgtaaaaccttcagccaaagcaatttgcatggcagcttgcagaatcatttctctgcgttgatcgcgattaagataggccatgtttcttacacctgactgaattcgacacaaactacattaaaatttaaagttggacaagtgtccaattgtgtatataataaccgcaatttgaacacatgtctaagttttggatatcgaagagcgttatgcaaaaaaaatggttaatcctcacaattatcgtcctcatttatttacctgttacgattgatgcaacggtgatgcatgttgcaacaccatctttaagtgcagcattgaatttaactgccaatcagcttttatggattattgatatttattcgctgattatggcgggtttgattttaccgatgggtgcactcggtgatcgtattggctttaaaaaattattatttattggaaccgcagtttttggtgttggttctttagctgcggctttttctccaactgcctatgccttaattgcttctcgtgctgtcttaggtctaggggcagctatgcttattcctgccactttatcaggtatccgtaatgcttttaccgaagaaaaacagagaaattttgcacttggtctttggtctacagtaggtggaggtggagcagcttttggtccactagttggtggttttgtattagagcatttccactggggagctgtattcctcattaatatcccgatcattttagtggttctagttatgatcgtgatgatcattcctaaacaacaagagaaaactgatcagccaattaacttagggcaagctttagttttggttgtagcaattttaagcctcatctattcaatcaaatcggctatgtataacttctcggtgctcacggttgtgatgtttgtggtgggtataagcacattaattcacttcattcgaagccaaaaaagagctacgacaccaatgattgatctggaattgtttaaacatcctgtgatttctaccagtattgttatggcagttgtgtccatgattgctttggttggctttgaattattactgtctcaagagttgcagtttgtacacgggttttctccattacaggcggcgatgtttattattccatttatgattgcaattagtttaggtggtccattagcaggtatttgtttaaataaatggggtttacgtagagtatcgagcctaggtattttagtgagcgcgctcagtttatgggggcttgctcagctcaacttttcaaccgaccactttttagcatggacgtgtatggtctttttgggctttagtattgagattgccttactggcctcaactgctgccattatgtcatctgtgccccctcaaaaggcgagtgcagcaggtgctattgagggaatggcctatgaacttggcgctggtttgggcgttgctatatttgggttaatgttgtcttggttttatagccgctcaattattttgccagccgagcttccgtcaaacttaattgaaaaagcgagtatctcgattggagaaaccatgcaattagcctctaatcttgaaaatcctttaggagggcaattagttgtagtggcgcagcaagcttttagctatgcacatagttgggtacttaccatctcagcgatctgtttcttccttttaactgtatttgtctggtttagttttccgaagaaagtaaattaatatttttcacagtatttaaagtttcggtagaaaactttttcttcgaaactttaaaattcactgatagtccagacaaatgatgtagttcgcagtttatctgtacggatatgagctttatacgttcacactcttttaaaaacaaagtatgcttatgcctgtaacaaggagcatacatgtatcaagtacttgctagaaaataccgtccacgtaatttcaatgagttagtgggacaaaaccatgtttctcgtgcattaagtagtgcattggaacgcggtcgtcttcaccatgcttatttatttacaggaacgcgtggtgtaggtaaaactacaattgcacgtattttagccaagtgtttgaactgtgaaacaggtgtgacttctacgccatgtgaagtttgtgccacttgtaaggcggtaaatgaaggccgttttattgacctaatcgaaatcgatgctgcttcaagaacaaaagtagaagatacgcgtgaacttttagacaacgttccttatgcaccaacgcaaggtcgttttaaagtttatctgattgatgaagtacatatgctctctacgcattcttttaatgcgttattaaaaacactagaagaaccaccagaacacgttaagtttttgtttgcaacgacagacccacaaaagctaccgattacggttatttcacgttgtttgcaatttactctaagacctttagctgtagatgaaattaccaagcacctcggtgctattcttgaaaaagaacagatcgctgctgaccaagatgcaatctggcaaattgctgaatctgctcaaggttcattacgtgatgcattatctttaactgaccaagcgattgcttatgggcagggtgctgtacatcatcaagatgttaaagaaatgcttggcttgattgaccgtacgatcatatatgatttgattttagcggttcatcaaaaccaacgtgaaaaagtgagccagttattactccaatttagatatcaagccttagatgtctcgttagtactggatcagctcatttcaacattgcatgagttggctttattacaatatttaccagagctcggcttaaagtatagtgaagaaattaatgccaaaattcttcagctttctaaactgatttctgctcaagatttgcagctttactaccaaatcgcatgtaaaggccgttcagacttgcagcttgccgtaacgcaagagcaaggttttgaaatgtgcgttttacgattattggcattccgtcctttagcaccaaatgaaattttagtttcagagcctgttcaacaaaatgggcaagcagaagtaggcctaaattcacaagctcaaacagcccaagtgattgctcctgtaagtgctgttcagcctgttgaagttattagccaacccgctatggttgaacctgaacctgaacctgaacctgaacctgaacctgaacctgaacctgaacctgaacctgaacctgaacctgaacctgaacctgaacctgaacctgaacctgaacctgaacctgatcaggacttaatggtatttgacccaaatcatcatgagttgattggacttgagtcagcagttgttcaagagactgttagtgttcttgaggaagatttcattccggtaccagaacaaaagttagtacaagttcaggctgaaacccaagtcaaacaaatcgaacctgaaccagcttctactgctgagcctataggtttatttgaagcatcgagtgctgaattttcacttgctcaagatacgtcagcttatgacttggtttctgaacctgttattgaacaacagtcattggtgcaagttgaaattgttgaaacagttgtggtggtaaaagagcctaacgcaacagataacagccagctgatgccacaagatattttaaagttgccatcacaaactttggaaggtgagtggacacttgaaaagtgggagttttggtttagaaatagccagctttctccagccgttcaagaacttgctcaacatggtgtgatgactggggaaattggtggcaacacggttttccatattcctcaagaatatgaaaatatgttgactcagctacaacaagccttaattgaagctttaaagcagcagtggccaaatacacaatttacggtcgagtatggtgcagtcaatactgctacaccgtatgttatgcaaagcgttcgtaaagaaaaagctttccatcgggctacagaactattacagcaacaacccgttattaaaagcctcatagagacttttgatggtgagctgcaaaatattcaattaaaaccttaagttcaattgagttttgatctggtgagaaacttgaaaaaatagaattttcatagttttcactggattgaaatattcaggtcacgccactgtcattgtacttttctatgttagccattttagattttaaatggactatatatcgtcatgaaaaggcaatgcacaggaacaacttcctttaaatattcttattttttattaatcggcgccattctgctgagtggctgtaacgactcggcaaatgataattcgaatacacccgacacaggtaaaaagcctgtcatgcgctgtgctccataaacttaaataataaaaagaatttgatcatgattacacgtcgtaaatttttaaattactctttaaatatgggctttggcgctgcagcgttagcggctttcccatcgagtattcaaaaagctctagcaattcctgcaaataataaaacgggcactattcaggatgttgaacatgtcatcatcttaatgcaggaaaaccgatcttttgaccattattttggtacgttaaagggcgttcgaggctttgctgaccgttttacaatccctctgccaaatggtcgccgtgtctgggaacagctgagaagtaatggtcaggttttaaccccatttcacttagatggaacagccaataatgcacagcgtgcagatggcacgcctcatacgtgggatgacagtcagttggcgtgggacaatggacgtatggcaaactggccaactcataaaaccgatatatctatgggctattttaaagaaaaagaaatcccatatcagtttgcacttgccaatgcctttacgatttgtgatgcctaccattgttctatgcacaccggaacagatgcgaaccgctcttttcatttaactggtaccaatggtgcaacaccgaccaagcgttcatttgtaaataatgaatgggactggattgatggtaacccagcaacggcagaccgtggttacacttggaaaacctatgccgaaagattagaagaagcagggataagctggatttgttatcagaatatgccagatgaatggggcgataatatgttgggtgcattccgttcttttagaaaggccaacattgcatccggttatcccgtttcaagcggtggagagccgaataaaccgtatgccgatacgggtcaaaaactaccgtataaagcctatgatgcggctactgataatgccaaaaatccactctataaaggcattgcaaatacgctaccgggcaataaaccagaagagtatctcgacgcttttaaaagagacattcgtgaagggaagttacctcaagtttcttggattaacgcgccatcgatatactgcgaacatccagacccttcaagtccggttcaaggagcttggtttattcaagaaattattgatgcattaactgctgtgccagaggtgtggagtaaaacggctctgctcatcaactttgatgaaaatgatggttactttgaccatatgccatcgccatcagcaccatctcgactcaaaaatggccagtacgcaggtaaatcgacactaagcaatgctgatatgcaagatgaatattttgatcatgctgcacctgaggggagccattcacagcctacacctgatggacgagtttatggtccgggtcctcgtgttcctttatatgtgatttctccatggagtcgtggcggttgggtcaactcacaagtgtttgaccatacttccgtgctcatgtttttagaaaaacgttttggtgtaaaagagccgaatatcagtccataccgccgtgcagtgtgtggtgatttaacaagtgcatttaactttaaaacaccaaatgcagatgttttaccgcagctgagtggtaaacaaacacgtctgcaggcagatgcgctaagggaaaaccaagaagctttgccagctgttcctgtacccacggatattaagttacccattcagcaaagtgggatccgtctatcacgggcgctaccttatgagttgcataccagtgcgcgttgtaaagcagatggtaaggtgcaattgattttttctaatacgggtaagcaggcagcggttttccatgtatatgacaagctcaatttagaccgtattccaaagcgttatattgtcgagccgaataaaactttagatgatgagtgggatgctttaaacgataacttaggccgttatgacctatgggtacttggtccaaatggctaccatcgtcattttaaaggggatgctcaacgtattatcgatagtggtgttaaacctgaaattcgagtgtgctatgacattgctaatggtgatgtttatgtcgaactcatgaatgagggaaccaaggatacaatattgacagtaaaaccttgtgcatatcgacaagatgcgccattgcaactgaccgtaaaagcgggacaagttgttaagcaacattggtcgttggctgatgttgggcattggtatgattttgaagttacgagcgagagtgatccgtattattaccgacgttttgctggccgagtcgaaacaggtgaggactcctttagtgatcctgcaatgatctaagttaggatgaggcaaaaagaggaacttattttctttttgcctcattttttataataaaaaattctctaaaacttcacggactgactcggatattggaacagtcttgcgtgtttcacggtcaacaaacacatgcacaaaatgtccttgagctgatgcttggtcttgaccttgtttaaagattgccaattcatagcgtaaagatgttgtaccaattttaccaatcgcaacacctacctgaataacttctggaaatgataactcttgaaaaaagctacaagctgagtcgacgactaaaccaattgattttgcttcatgaatatcaaaacctgttttctggatgagcaaagcattggctgccgtatcaaaatagctatagtaagtcacattattcacatgaccgtaaatatcgttatctgcccagcgagtttgaatatctaaaaagaacttaaattgatcacgagtttttaaaacgggtttagtcattaataaatcgcctgataaattgctaaagcagctgcttctgtcatgtcacgtggattattttgcagtaatcgagtttgcaacatggcatcttgagcaagtcttggtaagctagactcttcaatacccaaatcgctaagttttaaagtcaaaccactacggtctaagtgattttgcatatggtcaataaacagatcacataacccatcggtgctaccgttactatatgggtctagccattgcataagttctgcatagtattgtttggcataaggcgcattaaatttcagtacttcaacgagcaccaaagcattggtatgtccatgcgacaaatgaaaatgcccacccaatggataggctaaagcatgcacggcagcaacaggtgagtttgcaaatgcctgacccgcaagcattgagccgaacagcatgttctgacgtgcctctaaatcattaccgtttttaagaactttcggtaagttatggtttagcagctttaaagcgtgcttcgctaaaatatcggtataaatatttttcttatgtttagaggtatatgcctcaatggcatggaccatcgcatcaatacctgtagcagccgtaatatgggcaggtagattttgagtaaaagttgcatcaagaattgctgtatcggcatagagtaccggagagacaattcccatttttgtcgtttcacctgtagtcactattgatatgggcgtcacttccgagccagtaccggctgtagtgggaattaaaataagtggaagtcgggctgttttgacctgatttaccccatacatttcttgtaggttttgagtttggttgggatgtgcgagtaaggcaatcactttggctacatctaaagaacttccgcctccaaagccgacaataacatctacattttgctgtttagcataattcgctgcatctaataccacttgctctggtgggtcggcctgaacatcagcataaatgacatgttcaattttaagagtatctaaaatttgaagaataggcaggtgtaactgatttttaatcatacccgcatcagttaccagtaataactttcggtaagtttttgatgccaacacattctgtaattcttgtatagaaccgagtcctgaaataatgttgggaacggtctgaaactgaaaatggctcatatacattatttccttatttttgaaaattattatagatgcattctataggattcattctgcaaattctcttaaaagtagctgtgcttttaagctgcatttagttaaagaaaattcacttgaaaattggcattttataaactaattttcaaaatcattaaatgaaattagattgtgaataccttattggtaaatgcaaataaggtaaatttttttaaggatatgcatgtgaaaatagatactgatgtcaatactggatacggcaaggataccgacaaaaatggatatgcaaatattaagtatcgtgagctaattcaaaaattaacagcaacattatcattgacgcttttgtcatttggatggggctctacagtaaacgcagcacaacaacaaatcgctttagtaggaacctggacatctatcccagatgcaccgcttgtgcaaaaaccagaaaaagccagtgaaggtctgtaccagctacaagttaatgctgacgggaccttaactcctgttaaggtattgcaaatgaaaagtccatcttgggttgtaaaatcgaaagatggccgttttgcatataccactaatgaagaaaatgaaggggcggtaacggcattatcggttcaaaacggaaaggtagaggtattgaacacggtaaatagtcatggcgggcatccaacacatgcatccatcagtttagatggtaaattcctatttgtgtcgaattattctgcatttgataaaggacgtggcggtgtcgctgttttgccaattttaccaaatggacatttgggtgaaatggtacaaaatattgtttttgcggagggttctggtcatgttaaagggcgtcaggatagtggccatgcccattcgacaacttttagcccagatggtaagtatttatatgcaagtgatcttggaaatgacaaagtctatgcttttcgttacaacccaagtaagcctcaaccacttgaagcggataagagccgagatgtgagttttaagcatggttctggtccacgtcatatggtcttttcaccaaatggtaaacaggcatacattaccgcggaaatgcgaagtgaaattgtgacgtttaacgtacaagatggccatttgaaaaaagtcgctgagctaaaactagttcacgaagacaaaacacctgaattcaagagtgcaagtggaattattcttagtccaaatggtaagtatgtgatcgctgcaaatcgtggtgcggacaacaaacttttggtatttaaaatccaacagaatgggctgttaggtcaaccgcaagtttataaggccaatggaattgaaccacgtgctttttcatttgatgagtcaggtaaatatctgtatgtgacgaatgtttatagtaataacattagcttattccgttttgataccaaaaatggctcattaaaacctttaggcgatgcagctaaaatatcgactccaactgatatcaaattcttttaataattttttctcacactgatcctgcaatatttataagctattagatttttcagtgttcattgctacagatactcaatcttgaaagacaatcaagattgagttgaggattgagtacatagaaaattcctttaaaatctctcattttacttttcaagccgcgtgagttttgagaaaatgagagcttgtcacaatggtcaattcaaacctgataataatgaataattttgtcgggtttttgcagatttttgcgtgtaaaatacttatttattttttagtttaagtggttggaataaatttctaatggaagcacagtataaggtgttatgtgtctgtttaggaaatatttgccgttctcccacggctgaagtggtttttagacattattgtgatcagcatcaactcaatatcattgtcgattcagctggaacaagtaactatcatccaaataaagcacctgatcagcgtagccaattgcatgcaaaaaaaagaggctatgacttatcttctttgcgggcaagacaactttcaactcaagactttttagattttgatttgattttggcaatggatcatcaaaactttgatgatatccacgacttgctacaaagagctatcttccaatttggcagtcatcaaattcgagcaaaagtggcattaatgagtgaacatgatcctcaatatccacaacaagctctgcctgacccttactatggtggagatgagggctttgaacgtgtactcgaccaatgtgaatcaagtgcgttggcgtggattaatatcctaaaaaaacaattgaatgtttaaaaacaggtttttcaatacaatgcaaattcaaaatcaagtacagcttaagccattcaatactttaagtttagatgttacagcttctcattacactaaggtcaaatctattgaagatattgaagaagctttagcttttgctaaagagcatgagctaaatgtacttgtattatctggcggtagtaacatgctattaccgcaacaaattaatgctttagttattcatcttgatattcagggtatagacgttttatctgaagatcaggattttattcgagttaaagtcggtgcagggcaggtttggcacgatttcgttttatatagtacaaagcaaaattggtttggcttgcagaacttggcacttattccgggcttggttggtgcttcaccagtgcaaaatattggtgcttatggtgttgaggttggtgagtttattgagtcggtacaagtctatgaccgtctattaaaacaaaccggatcaatttcggcagcagattgtcatttttcttatcgacatagcatttttaaagatgacccagctcgttacatcattactcatgtcacctttaagctgcttaaacaagccaatctaaagctaaattacggtgatttaaaacaggcagtaggagataacctgactgctgaaaatttacaaaatcaggtcattcatattcgtcaaagtaaattacctgatccaaaagaatatccgaatgtaggaagtttctttaaaaatccgattgtaaatactcaagaatttgaacgattaatcgcacaattctcaacaattccacattatcctcaagcgaatggtaacgttaaaattgctgctggttggttaattgatcaggctggatggaaaggtaaacagcttggtgtagtgggaatgttccataagcaagccttggttttggtgaattatgccaatgcatctcttgcggatgtaaagaaaacttatcaagctgtacaacatgatgttgaacagcgtttccaaattatgttagaaccagagcctgtgctttataacaatttaggtttaattgaaaatcatacggaatagttttatgccaaaagtacacttgatggtacgttttgtacaagtagttactgtactatttgtactattaggctgtttcgtgatttttttatattcgccgttttattcaaaacttattgtagctggacttaactattttgttccggtagatgttaatgaagtggctgcggaaagccagcgaaaagcagcattaagtgaacatgacaacttagaaccggggtcaaatttatggattgctcgtcaggcttatttgaagttaacagaagatgctttacgtgaaaataagactgcagatttgggttacatacaagaaaactataaagctttgcagcaaattattcttttagaagaaaaagaacaagaactacaggaagagaaagaaacgacagctgtgagtgttcctttggttgcgaaaaactctgaaattgatgcggccgatgaagcaagtagccctatcgatgcagcactttctattaatagttctgaaaataaagcccttacagagcaatatacggagtttttagcaagaaaacctgtagtgccagagcatcaaaaagcggcgagtgagcctgagcagaaagttgaatatgttcgtaaaaaccctctgcctgctcaacctaaaaagttatcagaaccttatgcgattgtagtattgggcggtggtttaactttagataaaaatggcaaagatattgtagttaacagctatacgcggttaagactagaaaaaaccttagaagttgaaaagaaaaaccatctacctatcgtactaagtggagttgaagctccttatatgcaagcatggttgaaagcacgtggagtagatgcaaaattattagaaaagcgcagtatgaatacctgtgagaatactcgctttagttcattgttacttcaaaagaaaggtggtgcgcctacagttatgttggtcacagatgaatatcatatgccacgtacgcgccgtttatttgctttaaatgggatagaaactattcctgttactgctccaatgccaaccccgcttacacgttggcaaccgagtacacaaaactacgatcatagtcgtcgtgcaaattatgaattacttgcgacaattcgtgacatgttatttggttcaagtgattgtcgagaggtgccttaatgtctgagattccatttctcaatcctgccgtattaaaacaattagatttaccggttccgaaccgtgaactcactccgcaagttttaagcccactcaatttaaataccttagaagaaccttctcgtgagcttttagcataccgtaaattatacggtttacatttactggactgtgagcattggcaaggctatgtccaaatgcctttatttcgtctgcatgtccaagtttttaaacctaaattagacaaaatccaaggaaccgtatgtttattgcatggttatctggagcatagcggaatttatcagcccattattcgcgaaatacttgaacaaggctttagtgttattacctacgacttacctggtcatggtttgagtaatggttcacctgcaagtattcaaaattttgaccattatcaacaagttctgatggcggtttatcaatatgtcaaacatgctgatcaattaccgaaaccatgggtaggtattggtcaaagtacgggtggggcaatctggatgcatcacttgcttgagtatgcagaaaaaagacaagacccaatcgtcgatagggttttattgctttcaccattaattcgacctgctaaaacagcatggtggcataatccggtaggtctaggcattattcgtcgtattaagcgtcaagtgcctcgacactttagacggaataaccataatcctgaatttttaagatttattcgtttaaaagatccattgcagccacgcatgatgggcatggattggattttggcaatgtcaaaatggatgcaggaaatggaagagcgacctgcttgtcgtattcctgtctggcttgcacaaggggcattagatcaaacagtagactggcgttacaacatcgagtttattcgccgtaagtttaggcttcaaacattattgatgctagaagagggttctcatcaattaattaacgaacgtgcagatattcgtgcggctttaacaggtttaattccagcctttttgcatgcaaagccgaaacatttttattattaaagtttgaagctgcctctataggcagctccagttttaactatttaaaaatgattggcgtcagccatattccacatacgataatagaaattatcatcatcatttttcagttcagattgtaaaagctcaccttcttttaagaagaagtgtaattgagcatagtttttaatttcacggtcattaatccgttgagctaaatgatgagctttaatatccgatggatgacgtaaacctgccgcagcaatcatttctgataatgcatgtaatgtatttttgtggaaattaaatacacgttctgctttggtcggtacatggagtgctttctggcgatctttatcttgggttgcaacgcctacaggacattggtttgtatggcaactttgcgcttgaatacatccaactgcaaacataaagccacgtgctgagttcacccaatctgcaccgagagcaaatgtgctggcaatatcaaatgcactaataattttaccgcttgcaccaattttaacttgatctcttaggccagcacctacaagtgtgttatgaacaaaacgtaggccttcacgtaatggtgttccgatatagtcactaaactcaataggggctgcgccagtgccaccttcagaaccatcaactacaataaaatcaggcacaatttttgtttcaagcattgcttttacaatactcataaattgccaaggttgaccaatacacagtttgaaacctaccggtttaccaccagataaagtccgtaacttctgtaagaaatgcatcatttcaattggtgtcgaaaagcttgaatgcttcgcaggagagatacaatcatggtcacgggaaacaccacggatctcggcaatttcagcagtaatcttatgtttaggtaaaataccgccatggcccggtttagccccttgcgaaagcttaagctcaatcattttgatttgtggcaattgagactgcttagcaaacttctgttcatcaaattttccgtctaaagttcggcagccaaaatatccactggcaatttgccaaacaatatcaccaccattttctaaatgataagggctgagactaccttcaccggtatcgtgataaaaaccgcctaattgtgctcctttgtttaatgcacgtattgcattcgcacttaaactaccaaagctcatggcagagatattcataatggatgcactataaggttgaaggcattgggtattaccaatttgaatacggaaactcttaggatccgctggtggacatggactaatggaatgaacaataaagcgataatcttcttgatagacatcaataattgatccaaaaggtttatctgcattctcatttttagcacgttgataaaccaaacttctttgcatacgcgagaaaggaagggcatcttgatccgcttcaataaagtattggcgaatttcagggcgtatatcttcaaataaaaaacggaaatggcccataatcgggtaatttcttaagattgaatgtctattttgtaagacatcatatagacctaataagcttaatgcgccactgacgacccataaaccgttgagtaaagtatccgaaataaaataataaatactatgaggtgtatatacggttctaaaccacgtgattgtgagtacagtaaaaatacacaagaaccaaatagagtggcgtgaaaagaatgtattgagaaatttatgtcgaatgatttgtgccggactcgccatatgtgaacaaattcctaatgttttactggcacataccttgccaagaagcagccaaaactacaagtagggaattgtttaaccagtattttattcatttaatcttttaccaactgatcatctccctaatacgagaagctgatgagttggcaaagaccagagctttattaagctttaagagggagctgtttttttatgagcaaaataaataaggtgatgactaagctaaatccaaaaataggtaaactcagccctagaatagcaagcattaatgtcgtaattattctttgttgtgtagttgcatgtttccatacgaacaaagtttggttaataaaatgatgggtcgtaagctttacattggaggttttaaaccaagctttatacgcataaacaatcattatacatagcccgagcgcatacagaaccagaattaattgattgacccaaccgaatagtaccccaatatgtgcatcaactccccagcgtgtaagttttgcaactaatgaataatctttaaaagcgagtttatcgattaccttgtgttcatgcatatcaatcgcaatactatctgcttgtgtgggccatttgcgctgtatttccgcaacagtccaagcttggttcgcagcaactggcggtttgatttgtatttctgttgaattaatcccatttgctcgagcaattgctaatacagaatcgaattcagctggcatgatgtctaaatttggcgtttccatgatcatttcgtgatgttcatgatgagccatttctggcaatgaaatctgatttagtgaggtggtcaatattggtgtttgccagtttaaccattgacgggcaatacgaatattatcaccagcccattgagaccatgtaagaccagtaatcgcaatgaagaataaaagtggtagtaaagctaacccaatagaactatgccattttaataagtgatttttatttgtttgtctgtttttgaagtttgagcgacgcttccaccaactgtatagcccacttaaagttaaaaaaccaagccaacttgcagcaagttcactataaaaacgtccccattttcctaataataaattgctgtgtaattgatctaagaatgtacgtaacggtaatacgccactggttccatacacagcaagttgtccttttacagaaagcgtataaggatcaataaaaatggcttcattatttagatggtgtgtatgatcggaaaaaataacccgcgtagtttgcacagggcttggtgatggtctgacttctgtaatttttgcagttgcaggcatgacttttcttgcgctttcaatctgctggcttagaggatatatctgatttaaaggctgaacatttaatacatctttatagatgaattgctctaactgaggcgtaattgcatatagtaagccagtaaatgcggcaacaaatataaatggggcaataaaaataccggcataaatatgtatgagacggaagagactacgccaaaagctagaagtaggggacattttaaagtgatatcgagcaaactttgtcgtgaagtatatctactttaaattgtattttgaaattgcacttttcattggttagcttgattgtagattttctaaagtatcattgtgctgaattactagcaatgctgttgcttggtgttatgaaatatttcgtaaattttgctctctaaatacacagctcatatgatcaatacaatatttagtatagatatttatgaaaaagcactttatagaaaaatttttattgttaagtttgttttaaatattattcttttaatttatctagagaaactaaattatctatgatttatttgttagtattataattccgtaatttattctagtaccaatagatttatgatgttggtttgaatgagtacagctaatgagtaagaactcttttagagatattaagagtgtatgtataagctttttaataaaattttatattgttactaattctattggttaatattttaagaaaaattatcttattaatttttataatatttagtgcttaataaaatttttaaatgaaacttctagactaaaaaacaaaagtatactcacttgctttttagtctagtatttcaatattattaaattaaatagcgactaattcctcaattttctcaagatcgattatttttttaatataagaccaagttttttcagcattaattaaatttttatcaattgttccatcattaataaccccatcgaggatattaagaaatagattggttaatgcagcggcgtcctctacctgaattttaattaagatagaaaaaacaagctcatagagccattctctatattcattaataggatttttaacggatgggtaaagttgtactacttccatagttgcctttttaaataagcatccattaaattcttctgtgtaaatccagtcaatataccaattaaataagcttctgagttgaactaaaggtaggtcattggtattgattctttctaatatagcagactgtatatcagaattccttttgtaaaggcatgattctattagcttttcctttgaaggaaaatacttgtagaatgtcatctttgcaacattagattcagcaataattctgtccactccaatagagttatagcttttttcattaaaaagggcagttgctgtttttataatagtgtctctttttgacatcgatttccccgtagtaaatcttttgaaatccgtttcttttttaaggctagtgctctggcaaaagtcagtttaatcatattgaaaacgctaatgtaatacaacatgtgagagcctaaaaaaatagtatttttcgatattaattgttatgtgattcattaaaaaaattcattaaattatccattgatttgtagtaataataaacctaatatcaaattgtttagggatgagtatacaattttatttagtagcaaatgaatgcacgattaaaataatggggaactcataacctaactataagaattaatttgttattgagaatgattatgtcaaaaaaatttgaagatttcgataatccaagacaaaaggcattactggggatgaagaatagtattcctacagaacagtgggaagaaaatctaaaatttctcaaacaattaagagcgagaattgctgaattaccagtatgtaaacatccggcgatcgaagttttaaataatggattgcttgataaattcactttaacaagaattcatttagaatatcgtcatgcgattgttcagatctttactgatgccttattaatggcccagttccagacaaaacaattggagcctaaactccattctggagctaaaatgtttccacgtgttttattaagtttaaatgtacttgatgaatttggttttagacccggaacagacctggacaattattatctaggtaatccggagtatgcacattatcctttatatgaagatttattgaatgattatggtttgagtgagaaggaccgtagagggtatcaaccttcaaaaattgcagatcaggtaagaaattttctagaatcatcttatgatagttatattaaagtagttgctttacttgcagtggccgaagaagaagtgattctttttagcccaccacttcgtgaagcgactaaggctattggtgtagatgttgaaggtggcggctattaccatgttcatggggtatctactgacgaaacctcagaagcagcagatgatgatcatgaagatgatctctggtttgcgttagcgcaagcaataactaaagaagactatgagagcttaacaacgctttgtatggattattgtgctttatggaatgagttttgggatgcacaaattgctgatattcactacttagaagcaaagaagttagcataacttgtatccatagtaagacgaataattgataaaaactaaaaagcctattcatatatatgaataggcttttttaatactttaaatccagcccatctataaactaataacctgaagtatttcatttaatacattatttgcatctgtgggaaatgatagaattacgaaagtcagtaagttgatatgtatggggcttaaaaacatgcatcctataagtgtgagcaaatgaatacattcatatacagctatctgaaatttttaacctattgaaagtacaaaggtttaagtcttgttccaaccatttacaatccaaaccagattaggcggattctacttcctttataatatacctgtggtttttgtatttttattaaagtaaattaaaacaagaacttataaccataaaatgacgtattttattgttaactaaaaacgcttgtagactatttgtagactgttgagaaacatggttaaatcaaagttcgctaaaacaggtttaagacatgaaactcaacaaatctactgttgatgctattccattaactgaaaaaggtcaaaaaatatatagagatgcagaactgatcggttttgctgttcgggtaactaataaaagtaaaacctatattgttgaaaggaggcatgaaggtgaactctatcgagtgacaattggcaaaactaccgatattcctgcaacaaatgctcgagcaaaagctcagatgattctggcgaaaatttcaaacaatgaatatgaaaagcctatcaaattaaagaaggttgctaatcctttagatattaccgtgaatgaagctcttcaaatttatattgatagaaatgactttagaccaaaaacaattaggcagtaccgtaagtattttgatttatatttggggtggggcaacaaaaagcttttccagatatctaagcaagaagtactggatcgatttattgaggtatcagaagtaagtgagtcgtcagcaaatggtgctgtatctcttttaggtaccttatggaagtatattcatgttctttattcaacagatgagaacccgattcttaaaagtaatccagttgacattatttccgtaacaagaggttggaataaaatagaaagtagggatagacatctccataaagacatcattcacaaatattacaatgcagtgcttcattatgaagatgagttaaatctggaaaatactgctaggtctaacacgcatcgggatattgtattgatgtgcatgtatacgggatgccgtaaacaggaggcatgttgtttaaagtggtctgatgtagatattaaaaatggtaccttaacttttagagataccaaaaatggttcagatcatacttttcctattggtgatcatctacacagtattttgcgtgaacgttggttattaagagaaaacgattgggttttcccagctactaagatgcctacttcgtggaatatgcatgcaactaaggtagatacattattgaatagagtgggtaaggaagttgactattacgtttcaatgcatgatttccgtcgtacatttgccactatatgcaaccttttaagatttaatatttatgtgacaaaaagacttcttaatcacacggctaaaccaagaattgatgtgacaggtggttatgttcaaattccagatgaggaattaagagcttcaatgaacatgattgaagcggtgtatcaaggtaagattgattgctttaattaccaatctgtatgggcagaaagattaaaagaaataaaggcggtctaaccgccttaaactgttgcaagctgtgctgtattaagcacagtcttgctttgctcatacttcaaaacgtccttctttttatatgaaacacgtcttccaattttcgagaaaggcagtgatgattgatcacaacgcattctagctaatgtccaaggcgagcaatctaaataaagtgccacaacctcttgagggaacttctgttcttcattagccattatgaagcgatccaaatattcttgttgctctgcatcagatagatttctcagatcttttaacatttactcctccttactttccgctttaacttctaattgagtaccctcataggtgccgtcacccccgcaattcagacaatgtgtatacatgcctaaaccatccccatcaggacagaagttttcaggtaatgacccgtctagaaatacagtgccgccaattggctttgtgtgaatatgaggggcaaggccgtaataggggaaaatgcattcaccatttccatcatcacaaaaatcacatgttttaacttttacttcactcatccattagctcctcaactcattacgttctttcttcaattgacgcaaaaggttgtgaagagtaacggttacagctttatctagacttttggttgaatgaaactctgctagttgagacagtgctaaaccaaaaatgtgatatgcaaaaacttttgcagcttccggattgtttttgagaagctcttcagtacttggacaaatgattttttcaaaaatatgaacagctacctgatccggagtaccttcaatactgctagggctcaaattaacttcaccaataactttgctcattgttgagaatcctcacttaaaatttcccattcaccccaatcgcccaaataaccagattttgaaatgcttgttgtaatcacttgaccatcatcacaagttactttcattcgattggcatctatgcgaacagctttataaacaacatccatttgtaaatttgctggtaaagggctggggccatttacagacttaattcttacttccatttttgagccctcaaatattcttctttagtccactcaacaaactctttataaagctgctgagcgggtttatttaaccggttgttgtagtctattgttatgcggcgccaagctactggtacggcataatgtttcgttaaaagcattgcttggtttaacccttgctggactattacaaagcccagcaagtgcaagtaattagtaaaaccaagtaagtgcttgttattcactttcttgaattggtctttcattctagtaaccgtccactaatagataatcaggatcagcttcaggttgggtaggtgtaggattctctaattcatagcggcgttttctcacataccccattagcttcggttgaatctgcgggtctcgtgcagccacgtctatttccaaagcatctagcgttgtaaggtctggtgcgttctggatctgaaccattaaagagggtggctcattcgcagatgcctgttctttttctagctcttcaagacgtttgtgagtggcgagaaggataggcttcatttgttcgtcatcccatttgcgggtataacgataaaccgcatttacttctgcaggtgtttttgactcttttacacgctgtagaagagtatctagggtttgctgatattctggatctactttaggctcgttagtttctggaactaatagatcctcggatgatgaaacataaggcccctcagtaacaacaattgcactatcgagatcctcttttaaatctttagtaggctcttcaattactgttttttcagtattaacctgaggtgatttctcaacttcattttctaaaggcttttcttcttcaacttcatcagttggcttgttcagaagtttgagcatatcttcagcaaactcaccaccactgactttaataatcgcgcagcaatgagcaaaagcattatcaaaacttgagtggacttggccatgctgaagcatgcgtaattgtccttttgaaccattccacttaaactgctgcacacctaattcaacagttggacttgggtaagagcaagtagaacctttagcaggcgcttcttttaatggttcaggtacctcaaattcgccaataaaaatagttctaggctttaattgaaattcgaatttatcaaaaacatcaaagccaaagtcataagggttaaatggctcccagccattacgctcagtattatttactaaaagtaattcaccgttggcccaagcaagtttagcttcaactttatttagtattttcatgctgtcatccccgttttagctaatgtttcaatgtcttgtttaactgctggtagttttgcctcttcaatttggataagggcatctatgccgaagtgttcacaaactgttttcacgtctaggccgcgttcagctatgaagttttgaagttcatctctttgttgatctgagataccgttaaattctggtggactaatccaagtgccacgttgcttatcaaacgtgcaattcaatgctttagctctcattaacattgtttggcgcatgttctggtaatacatgtgttctttatcaagcgactcagttaattgattaaggtcacctgcatgctcagcttcttcacagctttgtttccagttttctagctcttcttgggctttagctgctgcaagttgtgcaggcgttaaggtgttaatgtgatctttagcttgagtaatcaggtcagccaagaaagtagggtgtgctttaagatcaggcacccatacttcaccggtttcaccgcctaaagcacctgagtttttcgcatgatgtgtaggcgaaggtttgaaattaataacgcgggcatttttaccttcaccagtagtaacagttgttagataacccatgacatctgcaatacggtaaagctcgttacggtttttaccacctagatctggtcggtaaataatttgatcaccgttttgatcttctgatgcgtgtgcaatgaaaacaacatctttacctaaactgatcaaagtattgatgtattgcttaaaagtttggttcgctaaaccttgagcctttaactttaaagagccatctttttgacggttattagcagttagcaatagatgggttttaatgcattcaagcattgcacccacggtatcaatgactacggttttatatggtgctaagtcctgcggagtaaggtttgcaacatcactccattgttgaacctgtacaaccgcacctcgacgtaattcaccagtacggtgagcaccacggtcaaagtcaaaagaaattgctttttccgcagtaaagcccatcgatgatttacctaaacccggatccgcgtataggtacacaataattgcttgaaccaataaagtttggtcagcagtaataatcggtagagccattttattatccttatcttgagccagtgaagccgcgcttagttttataagctttgcggtcacgtgtagggatgtttgtttcacgtagctttattgcgagctgctttctgcgttggaagtcgatttcttgtgtgagttcattccaaacttttggatagtcagtttggaacttttcaacgtccaaaggtgtcttaactgagtccttcaccttgtaaagaactgagccattagcattagatgcgtacacttgccagccaatgcggacagagtagaggcccttatcatcacggcctaaaaatgacatatagccgtcagggtgttttttgaaattagtcatctttaagcctccaccaacttgttacgttcgatgaagccttttagaaggtcattgatgttgcggatgtcttcaaattcggtgaaatcgttatatgacttaccgttaatgtcagtgatttcattcacagtgagttgggtaatatcgacagcggtgaattcagaacccggaacgccgtagctgtctggatgagcttcaaaatcaaagctaacgtttaaacggaagctatctaatttaattacagcaacgccagaatgtttacctgttatttttgcggttaaaaccccgtaagtacttggttgcgtttttggagtaaatagagaaggagcttcttttgtttggaaagctggttgtagctgacaagcaactaaagaaccacctgagattgcaacagcagccatgctgacaaatgcaaatgagttgaatgagttaacttttacgttcataattgatctcgcagttttgcaaaagcacatcggacctggggaggggcggtgtgcttttttgttgtctacgagacaaatactactttaagtagaaattaagtcaatacatagtaggaattatttcctacttaaagttgtatattattagttttaaataataaaaaacccacaaaaagtgggtttaaagtaaaaaattaataattggtttcaaagaaaataagctgaaattcaataaatatctcggtacaagccaaccacttttccaacaaggcggcaatcttcggaaagtttaataattttatcaggccagtctgggttcaatggttccaagaatttacttgttccttcgccctcaatgataagccttttaaaagtcgcctctgaatcgccagcgcaagctacaattacaagatcatctgttttaagatcaaatgtttgaatgtctggattcacatatattctatcacccggtagaaaggttggagccatagaatatcctactacttttaaagcatatccatttttcccgcatcttttatttggcggtaaatattcttcaatttccgtatctttcaaaactgtctcaatcggtgtaaatgaaccagccgcaacccaagagattactggaaccctgcgtccttcgaaaccaactttatctgataaatcaatattattgtctaacttagtgccatggtctaagtaactaatttccactccaaaaatatcagccaatgtttgtagcttttcaattcttggtttagcagaaccgagtgtatatctacgagccatctcataagaaacaccaatagcattttttaactcattgatagttttaattggagagtcttttgccttcatcaatgcgttgagtcggtccgcaaagtctttgtatttagcgtcttccatcaaaataggcttcttttctactgtgggtagaattttactatcaatttttagttgcaccaattctatttttggtagtatatttctttctactttaagtaggttttttggtgtcatttatgactactccacatgaagcatttaataacgctgtgacttttgcagggagcatctcagctttagctcgaaaaataggggttacaccttgggctgctagcaaatggaatcctgagaaaattccagaagatcgctgtttgaaaattgaggaaattactcagggtcaagttaaggcagaacaattacgaccagatattaactgggaatatgttcgcaagaaccttaagaagcaaaaccaatccgtgagctaattctcacaaattagcaaacgtgcgtatacgtgaaatttaaagagggattcacatatgagtgaaatcaacttaagcccagaggctaaaacagcaatttacaagatgattcaccagtcacaaggagttacgccgcaagaaattgcaaacgtacttggtgactcttacaagagcgtacttaattacgcaaacccaaatatggaaagccatttaccaagtattaagaagcttgaggcaatgattcagtttacacgcaacccagctttagttaaggcatgggcacacatgcttggttatgttctagtgccagctaatcaagtggatgagaaaggccatgaagtcagcattgttgaaaccttgctacatataaatattaacaatggccaaaccaatcaacaggtccacaaagttttagaggatggagttgttacacctgcggaattagcagatacagaagaaatcttagaagaaatggaaaaccacattcgccaacttcgagaggcgcttaagtcggaagctgcaacttatatttctaaggtaaagaaagaaaaagcctgatctggtccatcaggctagttaattcaattacttgctagaggaatcgaatatgcaaaacaatttagcaaatcaatcggctaattacaacttaccagaatttctatctggtgacgttgttgtacttactgaagagtgccgcacttttaaatcaaatgatttgtttgaagttaaaaacaaaaacttgactagtttatggaccatcaaatcagagaatcatttgattttagtttcttcaaaagaaatccgcacagcaacagttgctgaacttaacgccaaacgccgactaacaagcgctgagcaagcattagcggaggtgtcatgaacagctttacacagcaaatcaaagattctcgccagcaaagtgaaatccaatctttctatgagcctgcattacgagtacttgggcacctatttgaggtgaaaaagcaaaatttacgtaacaaaggttatgacgaaaataatgcagcggtaacaaagattgaattttcagaggctatggctcgtcaatttcgcataacgcagtggttagcacagcagattgtaaccagcttaaccaaggcgtgtttggttgattcttttggaggctatgttaagccaaagggtggtgaaaagtgagatatgcagcaagaagaaaacaggatatttccgtttccaccacaccgctagaggtggtaattccactggagcaaccagtaaagatctatacggctaaagaattagcagccatgccactttcagtcatgaatgccgcaattgaggctcaggaaagattttatcaacttgaagaattaactcatatggggggggcaggctatagcagttcgccgtctcatggaggatgggcacaaactaattcaggtgaaagaaaagtctcgtactcgctacaaaatcaacaacgaatttattcctccaagaattattcgtcagttggaaatgcgcggtcttgtaaaattaggagcagtcactgatgtataaatatctccaccatatcagcgactttatggttgctacagcgcaccttagcccagttgaagagtgcttttatcgccgtgctctcgatttctattatttgaatgaaaaaccattacccaaagaaacccagtcggtttttcgtcggttacgtgcaaatacccaagaagaaagggatgcagtattaattgtgctgcaagagttttttgtggaagaggaagacgggtttcacaacaaacgttgtgattcagaaatcgccgcttatcaaaaagtaggggataaaaatcgtgaaaatggtaagaaaggtgggcgtccacgtaaggaaaaaccaaaagaaaaccaaagtgaaggcgactcggttaattctgaaaacccacaaaaacccagtgggttaattttgggttctgaaagtgaaagccaaaaaaaccttaaccataaaccgttaaccgataaccaatatatagatagtagtagtaatgcgcgtgaagaaaattcgcaatttacaccaatccaatttgctcagtatcagatcgatgatcacaagcgttactcaatgcgtgaattcatttctgaatacagcgagtttcaatacgatttcatctcacttgctcaacaaagatttgtttctgtacctgaaatcgacttgagaaccatgattcaaaatttcggtgactggtactttgcaaacgaatctagttcattgaatacaccaagcatctggttggttaagtggttctcttgggttcaaaacaacgagaaacaagttgctgctaaccgcaagaaacaagagcaaatcaattcagctggtcaaaaaccacaagagtcgggttacttcgctaatctttttgaagaacagagcgaatctcaaatcgtggatgtaaccccagcaaaaaagtttccaatgattgaggaggtaggtcatgcatgagattaccttgaacgaagtgcgtcaattaatcgcatctcttcgcactgtttacgctgctcagttcaataagcaatttccagcaacaggcgaaagcgcaattcctctgtcagtggttgagcaaatcgcacttaaaacactggttggcgttcaacaaaaccaatttaacaacgcacttgctcgattacttacagcaggtggacgttttatgccgtcatttgctgagtttcgcacctggtgtattggtgaaagttggatgtctccagaggaagcttggtcacgtgcatgtaagtttacgactgacagtaccgtggttattacacaaattacaaaatatgcattagacgaagtgatgtatttgatcgaagccggccaaatgcgagcagctcaagataatttcttcggaacctataacgtgatggtggctaaagctcaattgaaaggtcgtcagcaagagttttacgctccaccgctacaactagaacacaaagaacctaaacacgttcctgtgagcaatgacgaggctcaaaagcatctcaaatcattgatggaaagattaaaaatcaatggtcgtaaacctgcaccagttcaaaaacttgaggcaaaagaaaaagagcctgagcttgcaaaagaattaggtccagatcctttcgacaatccgcacgaatacgctgagatgtgccgccgtgaaggtatgccaatacctagaaatattcttcagctaattgatggggcgaatgcatgaaagcatctaaattgattagagataaaggactgcaatacgcgaaggaaatcgtagattcagcacccgataacgcaactgaatggaacgagggttatgagttccaatgtggtcaaagtgtagaaatcagcccagcagatcgtgagaagtattttgtagatttggttgagcttaaacgtctggtggagtctttgaaaatcatcagcgatttaggtggagttgagaagctaacgcctgcattcattacgacagataagcatgttggttacacgcatgttcgcatggtgggaaatgggagattgagctttcttgatgatttttgcgacttcattccagatggttccatttcaattaagcgtgtgatgactgctatccgcgaccacgaatcaatatacggaggcggtgaatctcatgccaactagatataacacaggcgagtatagctacaatcttgaatatcactatggagatatgtcagcaagcatggagatgcttagagcacgtttaattgaattgttgactcctcatctgtctggccgttatgtgaaatggagagaagcatatttcacatggtttacaaagtgcggcggggattcggggtggatgttttgtgtaggtccacacgaatttcatattgatggggcgttaaggcgctattactcaggttctattgatattacctacaaccagaaagatcgatatttcttggtgggtgagaaaaagaaagtcaaatgtaaggcttgtaaggggtttggcttcattcgagatgatgggtgggggcatatagataaatgtgaaatgtgtgatgcagaaaaaggagccagccatgagtgagtttgagggtaaatctggaaagtgggcttgggagattcaaaaagaacaacaagcgaaagtggaggagctgcaaaagcgtttagatggggcattaaaagagactcaatatgctttgcagtatgttgaagaagacatgcgcggcaatcatgaatttctacaaatggcaatgattcgaacccttaaagctatagagcaagtgctcaaaggtggtgcttgatgtcatcagtcagcattgctgaataccgcaagttatttcccataaagaaaaataaaaagcgccgttcagcaaagcaagttgccagacaaccaagtgtgggtgaagtggttctggcaacgcatttaagagcatgcaagattggttttgaacaggaatataagttccatcctgaacgcaaatggagagcagattttttaataaagggttcaaagattttgattgaggtagaaggcgggatctggagcggaggccgtcacacaagaggtaagggctatttaggggatatggagaaatacaactccgcagcaatgatgggttttacagttttacggttcagcacagagcaagtgaaagcaggcgtggcgattaaacaaattgagcaattggtgggatgaaaatgaatatgccagtacaacaacacattttacaagcggtcgattggtctagatttagttttgaagagtggtgtcgccagcttggagcttggctaaacggcgataccgaaacaatggtcaaaattgttaagacgatgccaacaaaacgcatcactcaaaaacaaagagaaaaattaatagctatgtatatgagcgatgaaaatctaaaagatcgtttatgcattcgccgtaagggtacttgctgtgagttaaatgacaatgaggcacgtgcaatccatagattgattattgatattaaattaattgaagaccatattttacaagaatggatctcagcaatttggtcacatcatgttatgggcaattcattacgtgatattgctcaaagtaatgacacttcagttaatcaaatcagacaggatttaaaatgtggtatggcttatatcaaaagtcgaaatccgcatttcagatttgaaacttttgaaaaaaccgcttgagtgtgcgcacggggtatggcatatttgtgatacagtgttggaagtgtaagtaaatcactggtattaaagctcatcaaatgatgggcttttattttatcagaatgaataaactatctttaaatgaaaatatcgaaaaatttattgcaacgatatttaaatcgttgataataaaattttctttgctaaaaaaactgcatgagaatcatattttctttaattacgtttgtcttattttcatttatttcctttatccttttaaggaataaatatattgagccaaaccacttcgtcattttgataatattttctgcaattgtatccgcaataattgcatattttgatgaggttcaagagctatctattggaggcaatatcgttaaactaaaagaagcaaaaaaggagttacaagtaacaatagatcaattaaagtcaattaaagtttcaacatatcggatgttacttttgaaaagtttacatttttcaggtgtttttggaagcagccatttagtggatagtagagcagaatattttttttcactcatcaatgaaattaaacaatcggattgtttcaatgatcttaagtctgaaataaaagttcaattaacaaggttgttaattgatcaattaaataaattttatcctttattttatggcaaacaattcaatgatagcgatgaattccctaaatctacggttttttatatcgagttgaaagatgagattattgataaagttcatcaaaaacggacacctgttataccatttgatcaaaaaaagcaggaaattgttacagctatagataactatgcagctttgtatattttatttaaagaagttgaacagtagggtgatattgattttttattgcttaataagatgaatttaaacgatattattttaattaataatctccaatgaaaggatttttaaacttttacctttacgattctatagaaaagttgccgagcatagtatggcacaagaagctctgctaaatatcgattattggcggggctttttatttaataaataatcataaaatttttattactttaattttattgataaaatataaattaaacctcaaaagctatatgcagaaaaaatatgaaaaaaggaatttgtaaactatgcgacctagaaaaagaattgaagcgctctcatgttattgggagagcagtttttaaaaaggctttaaatggtgcaaattacgctttaagacttgataaacagcataaaaaagtgattaaagatcaagatcagtgggccacatatatgctatgtggagattgcgagcatgatttaaatacaaaatatgaaggctattctctagatattttaagaaataaaaagaaatctgtaaaacataaaaaaagagataatcactatgaaattcagggtgttaatcaaaaaaaactaattttatatttaatttctattatatggagaggaattgaatctagtcatgaagtttttaataaattgaaattttttgatgaatcgccagttgcaaaaaattttttaaaagaatgtattaagaatgatcgtgtagttctaacagaatgttacgatgtcagaatttcaaaattagtaagcacgataacttcttttaagaatgaagagttagattttataactgatattcattgtagtattgataataatgaacgaattcgttttttaactatttttgagggatactgttttgaatttttttactatacggattcatctcagtccgtttctagtttaggagttcttaagaaaaataaacgaatacttagaatgccatatattgatgttttttcaattcctgagtttcgaaaaagtctgttagatatgcttgaggcgcaaaatagtaactaaactattaatagtttagagatttaaagaaaaatcacttttacttaagttttaaattaccaagtcccgaatagggactttttaatggaactaatttatgaaaaacgaagttggctttcatgttcctgttcgtccaatgcctccagaatggctttttgaaatggatacacctaactttgttccagcgccagaattatgggaatggataagaaaggtttttctagaccctaaatctaaattatttaaccctgatcatatgcatttacggtcatttcgatatccagatattgctgtgatgtgggctagatctggctttaaaaagcaaggccgtcaggtcattgggactactgaaaaagtcatgatcaatgctggtggctggaagaaagaacgacaagaagaacaatacatccaatggttcaattatttacctgaatacttaattacttttgatgcttcatattcacgtatagcaagtgatgtgaacttttgtgctttggttgaacacgagctttatcacattgcacataagaaggaccaatacggaacaccagcttataacagagaaactggtatgcctaagttagctattcaaggtcacgatgttgaagaatttacaggtgttgttcgtcgatatggagctagtgaggatgttatgcggatggttgaagcagctaataaaagaccgcagctgtcacgggcagatgttcattacgcttgcggcacttgtaacttgaaggtggtttaaattttttttgccactctacttggacgtacttggacggatagagataaatggcaaggcttaataaacgggtgaaactctatatagtacggtcacttgctacctatgagacacctagtgaaacagcaagaggcgtccaagaagaatttggtatcaccgtaaccaaacagcaatgtgaagcatacgacccaacaaaaaaacaggacaggacttaagcgaagaatttaaaactgagttctacagagtgcgaaaggaaatgaacgacaaccttagcgcaattccaatcgcaaacattgcctaccgcctcaagcgtctacaacggttcatcgatcatgaacaattcaaagaaaaccctgtcattgtgccgagccttttagagcaggcagctaaagaggttggcggcttatataccaaccgtaaggaaataacaggggctggtggtgggccagttaaaacggaaaatacagaaaagccacctcaaccagcatataaacctgaagagctttcgaaactctcgcctcaggaactttctcgcttagtgattaatggaaagctatgacatacgcattagatgaaatagcccctttaattaaagagtggactattaacgtacgcctgcctgaagtaatgactgagatgacacggcgttattactacaaggctgcaattgagcaaaacgaacttagcattcaagcagagctatacaagtgcagtaaggatccagtccattggtttaacaattggatatggacatatgatccgcgcggtatggcttttggtttacctgccaatattccttttgtattacggcctaaacaagttgagcttgtggagtggctagaggaacgtgaaagcacccaaacacacggtctaattgaaaaatcccgtgatgagggcatgagctacgttgtgctgggttttttcttgcatcgttggttattcgttgaaggttttgcaggtggtgttggtagccgtaaggaagagttggtagataagaagggcgaccctaaaaccctatttcataaattccgcgatatgttcagcaaaatgccccaatggttaaaacctaagggctttgtcgagaaagtgcatgataactacatgcgaatcattaacccagataacggcgcaactattactggtgaagcgggtgacaacatcgggcgtggtggacgtactacgatgtattttttggacgaatgggcattcgtagaacggcaagaagctgtagatgctgccatttctcaaaacaccaacgttcatattaaaggatccacacctaacggtattggtgatcgatttcaccaggatagatttagtggtcgttacgccgtctttaccatgccttggcgagctaacccggataagaactggaccgttacctataacggcaaagttatttacccatggtatgaaaagcagctggccacacttgatgatgtggttcttgctcaagaggttgatattaactatgccgcttctgtagaaggcgtcttaattcctagtacttgggttcaagctgctatcgatgcgcataagaagcttcagattgagccgactggtgaccgtattggcggcttagacgttgcagatgaaggtaaggataaaaactcttttgcagcacgtcacggcgttgtcatgacttacttggccacatggtctggtaaaggcgatgacatttttggaacgactcaaaaagctatggatttctgcttcgagaaatccatcgatacgctgttttacgatgccgatggccttggcgctgggtgccgtggtgatgcccgtgtgattaatgaaaagcgcagagagctgggcttatccgagattaatgtggagtcattccgcggatccggttcagttcatgaccctgaaggggaaatggtagagaaacgtcttaataaagacttttttgccaatttgaaagctcagtcttggtggtcattacgtttacgcttccaagaaacttttagagcacttgatgggcgtgattatgatccagacatgatcatttcactatcaagtgaagatatcgatgccaaggaattagcactactcactactgagctatctcaaccaacgtacacaaaaaacggtgttgggaaaatcctagtcaacaaacaacctgatggcacagcttcaccgaaccgggcagatagcgtgatgatttgctttaacccgcaaattgctgagctcaatatttggggcaagctataaagagaaagttatgggcttaattaaatttacaagagattcgttccagaactttgcagctcgagttgggttgggttctggaagtcaacacgatcaatcgacttatggttttaacttcacaagccgaaatcgattgaagcttgaagcgatgtatcgatcaagttgggtggttgggcaagcggtcgatgttgtagcggatgacatgacgcgtgaaggaattaacatccgtggcatggatgatccagaagatgtggaggcaattaaccaggaactagatagcctgcaagtgtgggataagatcaatgagacaatccgctggtcccgactttacggtggggctatcgctgtaatgttaattgacggtcaaaatgtatctaccccacttaatgtaaatactattggtaaagatcagttcaaagggttgcttgttttagatcgctggatggttttacctgacttgcaagatctagtcaccgagtatggtccagattatggaatgcctaaatactatgatgtcattactgactcagtaggcttatgtaatcagcgcattcattattcacgtgttttcagaatggatgggattaaactaccttactggcaggctatagcggaaaatttatggggccaatcagttattgagcgcttagaggatcgtttaactatttttgatagcgccacattaggtgctggccagcttatctataaagcacacttacgcacatacaaggtaaaaggcttgcgtagtcttattgcagccggtgggcgaatgtatgacgctttggttgagcagatcaatcaaattcgtctatggcaatctaatgaaggcctaacgctgatggatgctgaagatacttatgaagcccatcaatatagctttgccgggcttgataatattctgatgcagtttggccagcaaattgctggtgctttgggtattccattagttcgtttatttgggcagtctccagcggggtttagtgcaactggtgagtctgacttatcaaactattacgacaatatcaaccagcagcaagaaggccgtatgcgtacgcctttacataagttgcttgaaattgtttcgcggtcaaaactaggtaaacctctacctgattcatttaagtttgatttcgcttcattgtggcagatcgatgacgagaaaaaggcagagattgcggccaaagttgccgaggcagttactaaggttgaagaggctggaatcatctcacgtcagacggcgttaaaagaattgcgtcaatcaagcgaatctaccggtattttctctcatatttctgatgaggaaattaaccaggctgaagatgatccaccgccgccaaaagaaggttatgacgatgaagagtcaaataagtcggatatcaccgcacctggcgaggaagaccgagatacggtacagccagcagcttagaaagattgcgggatacattgatatgatcgttaaaggctttgatgtaaatgatccaaagtcatacccactgatgattgcgtcattaaacgagtatgcaaacacgcttcagttttgggcgcaaaatgcagctggtcgaatcattactgatgtcgctttaagggatgagaaaacttggctcatttatgcaaaggatttatcacgtggtgtacgtgagcaaatcaggaatacggacactggagccgtatatcagcagcttttaaatgaccaagtaaggcttattaagtctttaccacttgatgcagcacagcgtattcatgacctgtctactcgatcgctaattgaaggcaaccgttcaagtgagattgctggcttgattatggcaactggccgtgtgacaagatccagagcaaatacaattgcccggactgaggttagccgagcatcatgcgtatttactcaagcgagagccgaaaatcttggatccgagggttatatctggcgaactagtgaagatggtgatgtaaggccaagccataaggcaatgaatgggaaatttgttgcttggaacagtccgccaactttggataatttaaaaggtcatgccggatgtttgcctaattgtcgttgttatacggaaccggtaatcccaaacttttgagcctattgtgcaaagctaaattgctgctatatttgaatattccaaattctggagaataaatatgagtattaaagctggagatgttgtacaactaaattcaggcggttatgcaatgactgtagaaaaaaattcgcaaagacaatggtaaggcaacatgtgtgtggtttgttgatggagaaataaagtcctatgacttcgcactagaagcattaaccgttgttcaataaggtctaaatatcttaaaaccaccctcgggtggtttttttatgcctgcaaaaaaggtgatccatgtttaaaaagaaaccgaaatcaaaggccacggtagatagatctaatttctacactactggccaacttggtagaacacgggaaacaacgcctgaaggttatttgctttgccgagatgttccattagctcggattggtaaattgctttatgccgatggtgaagtgccagttactgctgacaactccggtctaatcatcattgagcgtggtgaagatgttttatttgatccacgtacgatcgccagttttgaagggaagcctgttacagatgatcatcccaagggttgggtaaccccggagaattggaagaaactttcaaacggaactgcacatgatgtacgccgtggtgaggatgaagattctgattgtttagtggcggatctgctcattacagacaaagacatgattgatgctgtgatgaaaggaaaggttgaaatctctctagggtatgacgctgattacacggaaattagcgtaggaaaagggattcaaacaaatatttttggaaatcacattgctctggttaaaaaggggcgttgtgggtcgcgttgtaaaatcggagatagttttatgcctaaacagagtaaaggctggctggaaagcttgcgcaaagctaaacgtacaattgatgaggctttggaaaaagccaagagcactgatgaggaggatgtcgaaaccgaagatgacgatgaggatgatgatggcaaaacaactgatgctgcaatcaatcgtgaacttttaaaaaccctcaaaacagttcaaacaacagtccaaacatttgatgagcgactctcaaatctggaaaagaaaaaaccaaagattctgaatcggaaactgaagatgatgatgaagaagacgatggtaaggggaaagaaaccgaagacgatattttggaagctgaacaagctcaaaaattatctgaacaaggtattcaaaaccataccggtgattcacttcaagaagttttatcacgtgcagaggttttggtaccgggctttaagatgccaactttcgatagtgccaacaatggccaagctgttttaaataccaagcgcaatgtattaaaacaggcttatgctacggaagatggccaaaaagccttgaagccgtttgtaggtgctactccgaactttgacaccatgccagcctatacagtcgatgctgcatttattggggcatcggaactcatcaaacaacaaaataacgccgctggtgtacgttctggcatttctactcgtgattttggccgagcgccaatgacaccggctgaaatgaataaacgtaaccgtgaatattgggcaaacaaaggaaattaataaatgggtaatgcatatctatatcgtatgccgtcaggcattccaggtgatatttcacgaaaagcacactccacagttgaagcacacatccttaaaggtaattttggcgcctttggtattttcggaaagctaacagcagatggaatcgtaccgcttgaagcggctgataccgatgtatacggcttaattgtgcgttcttatcctacacaatcagctttaaatggaattggtgcagctgttcctcaatcaggaattgtgaatgacatcatgcgccgtggttacatgacagtaaaatgtaacgctggtacagcgaaaaaagccgggaaagtttatgtgcgtgtagctacaggaacagaactaaaaccgatcggtgggattgaagcggttgcagatggtgtgaataccatcgagatcaagaatgcaatgtttatgcatgatgctgatgctcagggcaacgtagaaatctcttacaacatctaaaatatttttgacgtaaatcacggcgctatatgcgtctttttttacgcctggagaaaatgaaaatatgagtaaattactcttagcttcgaccatgactcaagccgtagcaatgggtcgaccaattcgagcgcgtacccgtgattctggaacaatgcatacctttgatgcccgtacgattgatagtactggtgcattcctattaggtgaattggaacgcctcgaccaaactctacatgagccattagcaaatattacatggggtcgtgatattgacttgcgctctgatgtatcaattgcagatgaagtatcttcattcacaaactctacatttgctgcagctggtggtccatcacctaccgggaaatcttggattggtaaaaataccgatgctattgcaggaattgcgttggatatcggcaagactgcccaacctcttagcttatggggtatggaaattggttataccattccagaattggagtctgcacgagctgtaggccgtccagtggatgaccagaaatttaaaggtatgaatctgaaatatcaaatggatattgacgagcaggtatatatcggcgatgacacgcttggtgtagaagggcttttaaactcttctaaagtgggtgcgaccaacgttaataaaaactggaaactagcaaccccacaagaaattttagacgatgtaaaccttgtcttaaataacgcttgggtggcttctggttttgcggtttgcccggacaagcttttattgccaccagttcaatttagtctcttaacttcgcgtattgtcagcgaagcagggaatatctctattcttgagttcttgaagctcaatagcttaagtaattcagtgaatggccgacctctaaatatccagccttctaagtggtgtgtaaaacgtggtgcgggtggtacggatcgtatgttgacgtatacacagtctgaagatcgtgtgcgcttcccgcttgtaccgttgcaacgtacaccgatcgaatatcgtggtattcgacaaattactacctatttcggccgtttaggtgttgttgaatgggtatatccagaaacagcttattacgctgatggcctataaggggtgagcatgtctaagttagtacaaattcttctaagtaagccgctaaccgttaaccttggtcgtgatgaacaaggggaagcaaaaacaatcgttttgcaagctggaattcaagaagttgaagaagacgtggccaaacattggttcgtgaaagctcattcacaggaaattccagcacattcagcatataccaatgagcttgaacaagtccttgagcagaaagatcaggaaattgcagcaatgcaaatccagattgatgaagcagcaaaacaaattcttaagcatgacgaagaaatgaaggctaaggataaagaacttagtgatcttaaaattcagtcagcaaaagaacttcaagaccgtgacgctgaaattgcaaagttgaaggctgaattaactaaagctacaccggcaaaagaaaaggccacaccaaaggaaacctaacacatgatcagtgaatcctcttttcgtgaagaaatgccggcatttgctgatacaacgcaatatccatcatttcagtttaatttctacttaaaccttgggaagaagctgcttcgtgaggaacgttgggaggatatgctcgattatggtttaacactgttcatagctcattatcttacgctttaccggcgtacgatgagtgctgcaagcattggtgctgatgctggcaaaatcgtaggtaatgagacgtctaaatccgttgatggcgtttcaaaatctatggatgtttccggcgttctcattactgatgctggtcattggaaccaaacgacttggggcgtccagttttatcagttattactgatggctggcatgggaggcatccaattatgagcagtggtgttaaatcttctggtaatggtttagctgacattttccaagctgtagctgaactttctcaaatggatgttttggtaggtattccacatggggaggctcgaaccgatggtgacggccttaccaatgcgcagattggttacctcatggaaggcggctcaccttctcaaaacattcctgagcgacctttcctggtgccgggtgttgaagaagttcaagaaccggtaggcgataagctggttaaagcggttgacgctgctttagatggtaatagtcagaaaatgatgaaattgcttgagtccgctggaatgattgcaatgaattcagttcgggcttatttcgttaatggtgaatttgcccctctatctttggccacaatccgtgctcgagcacggcgtggccgtaaaggcgctaaacagtatcttaaacagcttgaaactggtccagctgagtctggcctagttcggccgttgattgatactggagagcttagaaagttggttacttacgtgatcatgaaaaaggaaaaggaggtaaagcgtggctcaacttgatgtttcagacgttttgctagatccagacttcatggacacaggcattatttgtaagcgcacagaggtcatcgtaggaaacaatggacgatctcaagaaacgactacatcaacaccctttgatggcgtagttactacaaataatggcctcaatatggaccgtcgagcagatggcacattgattaaaggcgcaatcaacattcacacgcagtttgctttaacttcaggcgataaaaataccaaagcagatgagattacgtggaagggtaaaacctacattgtggctcaagtgctggacaatctacattatggccaaggtttcataaaagcaatttgtgagcttaaaccactggggtaatcatgggtgattctgcttcagggggatatattacccctagtggcggatctgcttatgaccaagacctagaggacatctttcaagccttcattgtcgggattacatccttaccaggtgatatggttcgtccacgtttccaaagagaaccaccgccttttcctgaaattggtgaggattggtgcgccttcgccgtaaagtcaataattcctgatgatgggccttacttcgaccagaaagacgaaacaatggattcaattcgacatgaagaattgacgctgtttttatcgttctacggcgaccacggccaatcaattgcaaacgtcctaaaggatggtctaggcattccgcaaaacatcgcgcaactcaaagcgcaaaaaatcaaatttatcaaggtgggtgagatcatcaccgcgcctgactttctcaataatcagtatgtacatcgatatgacctaaccgctgtctttaagcggcaaacattacgcacgtttgctgttaagtcatttgtagatgctgggccgatagaatttcctaggagttaatccatgacattgcctgtttcagacgttgttaatgtctccattagtttggcggcattagcagcagggccacgtagcttcggtaatttacttattcttggtgccacggatggtgttgtagatccagttgaacgtttacgcgaatactcgggtcttacacctgtagcattagattatggtaccgatgcgccagaatataaagctgctgaattgtactttagccaatccccaaaaccacgaactttatatattggccgttgggttaaatcggcaagttcagcggttttaaaaggtgcggttttatctgcagatcaacgtgatatttcaaacttcacagctatttcagatggttcgatgaaaatcaccattgatggttctgaaaaggttgtaactgccctgaacttatcagctgtcaccaatttaaatggtgtggcatctgccctaacagccaagctgggtaccgcttcagtaacttggaatgatgtttataaccgttttgaaattacgtcattaaccaccggtaccacttcgacaatttcctatgctattgccaatgcaactggtacagacgtttcttcattgatgggtttaaccgttggtcatgcttcggtaccagtaaatggctatgctgctgagccattgatggatgcaattacacatttagcggacaagtcacttaagtggtatgggttagatatcgctgagccaatttctgatgcagatgtgttagaagtggcagcattcattaatgcgacttcaccatctcgcatttatggccagacaattactaactcattggctttggatggtaccagtacagccgatctagcctacaagctcagtaaattaaataacggtcgcgtattttcgattttttcgggtgatacggcacatgcagcagcttcagtatttgggcgagcatttagcgttaatttcaatggtaccaacacgaccattacattgaagtttaagcagcttccgggtgtagccgctgaagatctacaagtttcccaagcaaaagccctaaaagataaaaactgtaatgtttttgccggctacaacaatgacaccgcaattcttcaagaaggtgtcatgtgtgatggttcattcatcgatgagcgtcatggtctcgactggttgcaaaaccatttagagacggcactgtggaatcttttctataccacgccaactaaggtcccgcaaacggaaggcggcgtaaatcgccaaagtactatgcttgaacgggcattggagcaggcagtaacaaatggccttattggtcctggtcagtggaatggtgattcttttggagcagtagaaacaggtgattacctttctaaaggtttttacgtttttgcgaacagtctagatgatcaagctcaatcagaacgtgaagcgcgtaaatctccggttttccaaattgctatcaagatggcaggtgcaacacatttctccgatgtgcttgtttctgttaaccgctaataaggataagaaatatgtctacatattcatttatggatactcaatgtaccctcgccagtgatgacggggtaattgacctaggttacggtgcgggcgttgcagatgaaggcattaccattgcaatggctggtgatgcgaacactatgacgattggggcagatggtgagggtatgcactctctgagcgctaataagtcaggtacggtgacagttcgcctattaaaaacatcacctattaacgccaagctttctaatctttatcacattcagcgctcaagtactaagaagtggggaaagaacactatcacactaaatcacgctggatctggtgataacgctacggcatcaaaatgcgcattcaagaagcatacggacttggcttacaagtcagttggtgacttcaacgaatgggtattcgatgcaatcaagattgatcaaaagttaggagcttatgactaatgcaaatcggtaatcataattacgagattggtcgtttagatgcatttgatcaatttcacgtatctcgaaaaattgcacctattgtccctacgattgttcctttcatgactgagatactgaaaagcaacattatggatctattagataaatttggtgatgatccagacaatccagatctaagcgttttagaggactttgatctaaatagttttggtgaagcgatccagccatttatcgatgcattcgcaaaaatgccagaagaagatgtcaattacgtgatgaaaaagtgtctttcagttgttacacgtgacggggcaaaagtggtagtgaaagatacattgatgtttgatgatttaagcgttgaacatattcttccgcttactattgcagtggtgcgcattaatttgggaaattttattcaagggctgcttacgacggcattgagcaagaaacagcccacataaagtttaaacatttaccagaccacgaagattggcttttacggccagtcattcgtggtctttgtcgttttgaatctttaaaagatggaactttagatcttgcagatattgcattgatgaatgatgcattagatgtgcaggcagataaccagcttttactcgaacgataccacgaacaaaacaaaggttgagttagacatgagtgatacagttattcgtgacttctttgtgtccttaggtttctctacggacaatgaaggcgctagaaaaatggttgatacccttaaaggggtagagctaaaagcggctttgctgcataagactttattgcttcttgcaactggtgcagttgttgccgtaacaaagacagcaagtgaactcgataagctgtattactcatctcaacgtattggcgcatctgcttcaaatattcgtgcttatggtgatgcaatctcacaaatgggtggtaatgctcaaaatgcattacagtcacttgagaatgtggcgcagaagatgcgtaactcgcctggttacgaaggtatgttaactggcatgggtgtagctactcgtgatggtaacggccagttgcgtgaccgtgtggaagtaatgaaagacctttcaaagacaatgaaaggcatggattactaccaggcaaatgcttacgccagttcattgggtattgatgaaaatacccttatggccatgcgcgatgataagttcatcgacaacatggagaagtatcaaaagttacgtcaaagtgttggcttaactgatgagcttactaagtctggtaccgatttcatggttcaattccgtgatatcaccatgacgaccaaagccattacagaagtggttgtaatgactgcagggcaagcacttattccagtgctgaaggtgatcaataatttcttacgtagtgcgattgcatggttcgctgaactggatccgcgttttaaagctatcttggccactggtttaaagtttgccttgcttgcgattatctttggtggctttattggcacaatcgctaaattagcttctgtgctgccaatgctgaaaagtctactctttttaatcaagtctttacgattggccttcctggcttctccaatcggtattgtattggcgcttgccgctgcaattgctgctttgtgggatgactaccagacatggaaaaatggcggtgaaagtctaattgactggtcaaagtgggagaacgggattgaaaccgcaattagccgtattaagcagttggccgagttaatcaaaagccttaaggataaaactgtagagtttgttaccaaggcaattgatgatccagcaggaaccgcgaaagagacagcagaagcagctacccaagctgctaaaacgggtgcagcagtagttgcgaatgtagctaagacaaccgtaagtactattaagaaaagtgtttctaagagttatggttttagctttggtaaagatgttgatagatacattcatgaagctgctacaaaatatggtcttgatgagaaggttttacgtggcttcgttaaaatggaggatggttggactgggaaaatgtcacctacaggagcgattggtaccggtcagtttattcagtctacttgggataatctggcaaaaaccgctgagggtaaagcaattggtatgacaaagatcgggaagagatttcgtactaaaaacgatcctcgttatgacaagcatattaatactttagcaacaggtcttttggctaaacagaatgcagatattcttactaaaaatggattagcagttacgggggagaatctttatttactccataatattggaccgggaattattcctgctttaaagggttctaataaggtgtctgctaaaactcttgaagcaataagagtaaataccccaattaaaggtcaaactcctgtacagtttgttcaatatcaaaaaggacggtttaagaagcattacaactcagcaaatgttggcgaaaagatcattaataatggtgagactaagattaataattttggtccaccaaatggcaatccagacaaagcccaagttaataattcttcaaatatgtctgctaaatcagtagtaatacatcaaagctataaaactgatatggtaatcaatggtgcaagagagccagtagaatcagcgaacgctgtaaaaaaacagcaagaaaatacgatgattcttttggctcgtaacactaaaagtttaattggttaattggcatcaatatctgtttttagctgttttgcacgatcattatttaactggacgatacagttcgcatgtgcgtttctttcaccgtgatagaaactataagttgtgcaatagctgtcacggtaaagcaaccatgctttttgtgatttatttaaatcatttatgacattaggattataagttaactgttccttggaaatttcttttaactttttaagattagaggtgactttcgcaaaggattcgtcttcataacatttcgctacatcagtaggttcattaaagtaaatttcgcagttagcaaaagtgccgaaacttaataatgatgctgttgccaacaataagattctcttcattaatctttattccgaatagttgtagagatatttaaagtatcactttgatctttactatcagcaatactttcatgttttttataatcttcttcagtggggatgtattcgtgagcagctttttcagcttctggtgaaaattcctccttatcactactatctgaatttttcttttcagttaattgtgtagaagattgcgatttattaggggtgttatcaaattttgccaagtaaatggcaaagccaatagctacaattactacccaaaatatcagtttgaaaaagaacttaaagcaaccgccttttgattcatacagttcatttttaactgaaaagctttggccacaatttttacaagtgtattgtgatttaagtatatttgatttgcttgaagcaaatcgtgtctgcttactattacagtagggacaaattggtcttgatgatgtgctcacaagaattaacctttattttaaagtgatttatctttaatcaaaaattatataggtttagttcaagcattgagaagcaacattttttgaaaatatttaaacccaccacttggtgggttttttattgcccggaggaaagcatggctatcactgaaacagttggctcactattgtttggtggtcatcgttcaataatgggtttatttgcagatgtagttattgaagagaatcattctgatgagcttgtaataacagagcatcccgttgaaaaaggttcaccgatttctgaccattgctataaagcaccgccagaggtcaccatgaaaatcgggtggtctgaaagtgctggaaggatgaatggtcttattggtaatacatttattgggtcagatttgtcacttcttggtatttatcaggggttacaggccttacaaggtcaacgacttattatttctactggtaaacgcctttatacggacatgttgattaagtcattaaagaatgtcactgatgaaacgtccgaaaatgctttgatgatcgatattgtatttaagaaagtttttattgtttccacaaaagaaacgctggtttctatcgctgatcaaaagaatcctgaagtaacttctgatgttgttgattctggtaccaaacagctgaaacaagttaactcttcagtattgaatactgttttaggaccagctgtagatgcttttagttcattaatgagtggtaagtaaatatggctttgtatgaaatccctttgctcgatcggaatcagaagttttttatcaaactaaataaagtgaattatcagctcaaactgatttttctaaagcgctggtatctagatatctatcaggcaaatgctgaaccaattgcccttggaattcctttagtttcggggttagacatactaagtccttacagtcacatgattaatggctcaatgtatgttcaaaacttaaatgaagatgaaagccaatcatttaatgacttgggcactaacatcaaacttttttggcaggatccagaatgagtgaacaatggaagcgtaattgccggctaaccgttcaacttaagtatggggagcctgaggcattagatttatctgaaatgcgaattgtatttcgaataagtcagcctacggccgaaacgcctaaggcagcagagttttatatctacaacctttctgaagacacaatgaatcgcttggctggtgaagataactcaaatgtcggtgctatggtcacttttgaagtagggtacggtgatgagttgtcaaccatttttaaaggttcaacttttcaataccggcgtggacgtgaaagccctacggataagtttttatgtattctggcccaatcgggcgataaagctaaaaactatgctttagtgaataaaaccattgctgccggcacgacagtagatcaggtaaaaaatgaaatcgccaaagagtatcaggctaatggtgtagaaaccggtgaattgccacagcttagtgatcaaacatatgttcgcggcaaagtcatgtttggttcactagacgatcagatccgccagttttgcaaagacacaaatacggagtacttcattgatgatgaatacctctacattgtcggaattagtagttatttgctggactctgtatttgaaatgaatgcaaatactgggatggtcggaatgcctcagctaactactgaaggcttaatggtgaattgcctccttaatcctcaattacgccgtggtagacgcatacatgttgatacttcaagtatccagacacaagcttttgatattgattaccaaagccagggcgttgatcaaccacaaaaggatctaaaaacggctggtggtattaatggtatttacatcatcaaggcagttgagcactacggagatacacgtggtgatgactggtatacaagcacagtttcagttggtcagggtgctgtagttcctaaatctggtattacaattacggcggtggattgattatggctttaagtaataacgaaagatcgccccatttgcttaatacaatcaacgatgcgattaaatctgctctagcagtactgtggactaatttgccttgtatcgttgattcttatgatccagataagcaaacagtatcagttacaccagctattcagataccggtaatgcgtgaagatgggtcaatggagttagtggatctaccattaataccagacgtgccggtatgctggcctaaagctggaggctttgctttaacatttccagttaagcggggtgatgagtgcctagtacatttctcctctaggtgcattgatttgtggtggcaaaacggaggcattcaaccaccgtttgaaaaccgtaagcatgatttatccgatggcttcgctacatttgcgccgcaatctcagcctaaacgtttaaaaagcgtggccactgatgcagttgagttaagaaatgatggaggcaatgccaagatccggattaatgatgctggagagttggagtttttaggtaccaaagctacttttaattgcccggttgaaatgaaagatgggttaggcgtcttaggggcattaaaaaataacgatgtggatgttggatctagccatggccatacgaaagtacagccgggtaatggtgagtctggtccaccgaaaccataaatgaatgaggggtcgctgaaaggcggctttttttatgcgctatagaaagctagatgaagatggggattatagctttggccaaggtcaaaataatttccatagtaatacacctgagggtgtagcgcaggcggttatgacgcgtcttaagttttgggtaggtgaatggtttgctgatacttcagatggtacggggtggacaacagacgtgctggggaaatacacagatcatctttttgaattgatgattcaccagcgcattttagagactcaaggtgtactccggattgattcattcgatagtcaatttaatggagaaacacgcacgttatccattcaatcatccatcaccacgatctatggtcctgccgatctgcaaggggatatttaaatatggcactaactagcatagccccagtaattaaccaatatggcgtaacagtttcaacatacagtgaaattgttgagcaccttaaagaaaaatgtcgagaaatttatggccaagatgtttacttagaaaatgatagtcaagatggacaatggattggtgtaattgctcgtgtaattgctgactgtaatgcggttgtttccgacgtttacaactctatgtcgccaagtactgccgatactgatgcgctttcacgcaatgtcaaaatcaatggcattcgccgtgcagtggccacaaaatcaactgtatcagtggttttggtgggcgttgccggcacaatcattaataacggtattgtgagtgacaaaaacaataaccggtggttgttgccggcacaagttgttattccttcagaaggtgaaatagttactacggcaatagctgaaaagcctggagcaattttggctttaccaaattcagttacgaccatttcaacacctacacgtggttggcaatcagttaataatcctcaggcttccacattaggtgcgccagttgaaagcaatgctaaattacggcaacgccaggcactatcgactgctattccatcgcgttcttatactgaaggtattttaggtgcgttgtttagccttgatggggtaagccgttgtaaggtttatgaaaataaaaagtcattcgtagatcctttagggctaccaccaaaatctttagcggtagttgttgcgggtggaaatgatcaattgattgctgaaaccattcgggtaaagaaagcgcctggttgtgatctatatggaaatacaactgtgattcgcccaactgtctatggagatccagtagaaattcaatattggcgacctattcaaaagtctattggtatccgttttgaattaacgactaattctgattacacggtagatattggtgagcaaataaagagcgcttcagccgattacattaatcagctcgatattggtgaccgtattgcaattaataagctgtatgtaccagcaggtttatacggtgcattggatgccaggtcttatgaaattgaaagccttcaattgactgtagacggcgtaccagttgagggtgattacaccttggcttttaacgccgtggcctattgtgattcagacaatatcgagatcagtgttgctggaggtggttaatgcaaacagatgattacttgaatctgatcattaatgagcaccgatctaagcctaagtttaaacagacagtcaaagaatcaatagaacctattcttgattgtataaacgtgctgcaaagcataaatgagaagtttgacttagatacagccactggcgatcagcttcacattcttgccgagtgggtgggtgcgccactggttgttcctaatattattcctttaccgttctttggtttcgaggggcagcctgaggcattaaccttcggtgaaacggataacccagatattggtggtttttggcgcgaatcaggtgtcagtagttatcgtggccagagcaccccccctcaaaaattaccctcagttgttaaagctaaaatcttgttaaacaactgtgattgcactctcgatgaagcatttgaaatctgcaagctattaactgatgtgcctttcaagctaaaggacaacagagacatgaccgttacttttgaatttcttgcagagtttcaacctatagataaagaactagtccgcttgttatttcctttaccaagtggagttgagctaattttttcggatgaagtagatggataagttagaagaatttagcctgaacgggccaaaaaataccgatggactaactttattaagtggctttccatcaaatcagaaacccgctcgtcaatggtttaactggttatttaattcaataaccaaaaagattaatgaaatcattgatggcaagctggatgcaggtgctaatgctgtttctgcagcaaagttagaaaagggacgaaagataaatttcactggtgtaatccagggtagtggcacatttgatggctctaaagatattactatcgatacggtcgacggtggaaccataggtgaaaaagctatcgctattattcgcctcaacggctcaacgttcgatttagtcaaaagccgtggctttgcttcagttgaaaataaaggtggcggccaaatcgaatttactttgagtgaggatgcacctgatacagattatggcatcgtatgtactggaacaagcaatcgagctgatgcagttagcttgcaagagcgtgaagactttgcccggacaaacaccaaattccgtctgatgggagcatttggtggtgataatacacaaggtgcttatacccctcaaatatgcactgtagtcgtctattactaaactgattttttaaattttatgaccgccttctggcggttttttgttgcatggagatccaaaaagatggcaacaaactggaatgcggttttaaacaacacaaataacttcaatgatgtattggcaattttaaaaaaactgctagcactcatgggcgatttatctactcttgattcatcagaggttcttttacgtattgatgagattattaactcatcggttgctgattttaatgaaaaacaaattcaggcttttaaggatctcaaagaagcaattgaagttgctagtgcagccggagcaggcgaaaacgggtggatagatacactggtacttactttaactggagaaaatctcagggaatttaataaaaaaactatcagtactttagattgtattgatgatttagctactacattgccatggccaggccgcaccgtaaatgtacgatctgtgataaaagataaacatttagggggaggaacttttgtatttagtgctgatagttcaaaagttccagacggttatattgttgttgctgcaaatggcgggaattgggtgaaaatcacagttgcttttccaacaattgatgattttggcggtctgggtgacgacccaaattatgacgatgcggacgcatttattcgatgtgcgttgagtccatacacaggttcgaatatttatcttgctaacagacaagttgaatatcgcatcaataaacaagttgattgcaagggtaaagggattgttggaggtggatttagtagacaaaatgccactgcgtatgcaatgaactctctaaaggtaagaccaggtgattattcaaattcaaatacccttcttaataatgtggcatttattaacgtgggcgccgaagtaagagatttgcaattagtaagtgagggtgtttcagaaaatatttcgggtttaaaagttgatggttataacttcacactttcaaatgcaaatatttctgggttttacaatcaagtatatttatcgaatgcaacggtctcgttccgtgtccaaaatttgatgtcaattagtgcatcaaatgcagggttttatattgctgatgttgattctaaacaaagtactactgcatattttgacaactgctcatggcaatggggtaaataccctgtgctgtttgctaaagaagcttatcagtgcgtctttaataatattattcttgaatatatgcagtacggtttaacagcgggtatctggtcgaattgctcattcaatgcaatttgggcagagcaaacaagagatggggtagctcgtactggcttgtaaatacttcttatcaacaaacatttaattgcatcactaataatctatacattagaacgccttggctaaatcgagctgacacaaccgctttggctgtatcagataatattgggggggttgtaattgataaaagtcgaattactttaagcggtgcgacgggtgcgaaaatacaactttctccatctggtttagcaacactttttgctaattggtatggtggtactaatcgaagattattaattactactcaaccgactgcggcagattctgggtataaaacaccaatccacatcaatgcaccgaatagcgaattgtattttggaaatcaggatgaaacatcagttgcaagtgtagtatttaagcgagtaattggcgctactgctacaaatacaccttatattgcgtcagactcgtggactaaaaaaattcgaaagtggaatacttacaatcacgaagtatcaaaagtcgggcgttttattgcaccgatgatgctgacttaagatgtcaacttttactactcatcaaaatcaacgcaggctggtctatctccaaagagtctacgggagtctatagattgcaacgagatgcgggcgtaacaactgaattagcaaatccgcacatttttgtttctggcattttttctggaccgggattaggtggtggaaaggctatattgccaccgacgctacaagcaattgaagcatacagtgggagttggtcgtctttcaaagttgcagctggagtcaagttgttttttatagatttgacaggtgcgttagttgatccaatgcgcttctcagtatcattcacactagaatcaggaatttaatatgacctacgcagatatgtatgtacagggtgcactgccaaagattgaggcagacattgcacaaaacggagtatgtactctttattcaaagatgactttaaatgaagaaacaacaacggccatttcagatatacttcgtgaaaaaggcttcaatacggaagtatcaattgaagatgatcccgattttattggtagtcgatataagcttgtaattaaaaaagcatcgtaactacacagcaaaaccacacaagccctagctttaaataagttagggcttttttaatgccaaaaaatctggagaaataaatggaaccagtttccactagtggctttacagcactattaaaattttatgggtttgcaattgtggtggctttggcggccagcttggttgtagcagttgtattaatgacacgtatgccacgctcaccacaagagtgggcagtgggcttgatttgtacggttgtatcaagcctcgctggcggctcattcattatcgtgaaatgggggcttcatgaatgggttactgatatatgggggatgattgctcttggaggattcttctttgtttgtggtttacctggctgggctttagtccgctggatctttaacttcattaacaaacaggaaggtaagacgattattgaagtacttaaagaagttaagaaagctaaaagagatatcgaaaacagttaatgccgccttcgggcggttttttattatctaaaggaaagtgaaatgaacattgaacaatatcttgatgaattaattaagcgtgaaggcgggtatgtaaataacccagctgatcggggcggtgcaaccaaatacggtattactcaagctgtagcacgtacaaatggttttaagggcaatatgaaagatttgcctcttgaagtggccaaagcaatttatcgcaaaaactattggacagccccacgttttgatcaggtgaatatcatttcttctgctgtagctgaagagcttctagacactggtgtgaattgcggtaccggatttgcaaaacctcttttacaacgtgctttgaatctcctaaataacaatggtaaagcagggtggccagatttatcagtagatgggatatatggtccggcaactcttaatgcactcaaaacttatttggtcaaacgcgggaaagaaggagaaaaagttttagttcgagttctgaatattatgcaaggtcagcgttacattgaaatctgtgagcgcaatccaagccaagaacaatttttctatggctggattgctaatcgagtatcaatgtgaagtacctaattttactgtgcattctactcaagactgcacagttacttcgacgtatagtgaggtagttgtaaaagtttataggtaagttataggattgattggtaataatctttaaattttagggggggattgttcagatgtagtgtattctgtaaaataaaacttaattatattttgctttcaatacaatgaacgatcaagttttccaattacaaattgttataaatggaggtttaacccccattcaatctaagccagaaacacttgataaattagtaaaagaatttgctataaatcatttgttgtttccaaaagaaataactgaacaattaattgagattaattctcaggatggttctcaaacaaaaaagataactaaatttattgatttggttagtagcaatcaaaaatgtacctaccaaattagaaatgattcacttgtatttttaaattcctttgagaaaatagaggaattagaaagtatatttgaaaagttttttaaatcgttttcggatctgaccccatatataaactataaacaatcaaaaagattggggctagttcttattagggaggattataatgaggttacattacgcgagtattgtacttcagaagaattagatcgaaatgttattgagaatagatcgagaaaagttactcgttttgctatggcggaactaaatgaaatggtaaatttatctgtttcaaaagattatgtaactcatgaatcaggagtttctcgaaatactctagcaagtgtttatgatgttaatacgttatctactaaggatgtttttagatttacaagtaaggatgtagtaaagtttataaatgcttcaaagaaatttattttagaatcaatgtaagattttttatatgaactattcaaataatttatctaataatactatgtatgaaagtggtaatcataaaaagataatcactaagtacgagattgaaacaataaaaacggtttggcaaaccgataagatacagtcttttttaaaagattacttaaatacagacgtagttagtattactgaccccactgttatagaacaaaagataggggaagagagcttaaagcaaattaaaagagaatttgatatttttaagaataaatttgataattttctgagatatgaagatgtgccagtcgattatgtttcacctattgaaaatgaattaatcaacttttataaacatagtaaagttgaagttcaagaacaaattagccaatggattattgattcttttgataacacaaaggttcttcttaatattttaaaaattttaggtaatattgctcctgattttattgatcatcaatttttaactaattttcttatcgttcttaatcataaagatactgaaatcaaagaatatgcattaagaattcaagagaaattaatgcttccatcatataataatgtactgaagcactctaagttaactccaaaatggattgatgactatagaaaagaattggttgaattgtatgaagaagataataaaggtagttaatttaatatgactatttttgtaagaaagataagtaaagcaaaatggccttctgaagaggaaattgcagaaaaagcactggattcagaaattataccttttgtcagagccgatgccttaactacttgtttaaaaacttctcaaaatactttatctgtttgggcagttgaaaattgtactgatgctgaaatagagaaagctattcttgctttgattaccaatacgaaattagaaagacttaatcgaattcaaattgtttatttttcaaaagaagatgtagatagtttagggttgccgattgcagtaacggaaggagatacaattattgaatctttgtctaaattacataatgatttagttgatttaaattatgaaaaattgggaaaagtatctcaattgattatttcttccttacgatctgaaagtgtcagaacttataatgaaagaaaattaaaagatatgcttttaaaggctattaatgaaggtatagttgaccaaaaattattacatccttcactacaatctaaattaggtttgccagttttagatcaaaatggtaatgcacttattaaacaggaaaacggcgaatttgtaaaagtttaattttttattttatagttaataattcatcccacttaaaaggattcctgctaagtttatctctactcatcgaccagttccgaccaggaacaaaacatggtccgacacctaattttttctttccaaacttactatggataccatccatagcctgcattaaacattcctttttctctatttgtttaaagtcagttaataggtcataatgatatacgctgaattatcaggagactttcccttgggagattctaggcagccaacttataaaagtcttcggccatttgatttggtgtcttaaaacccaaacccttttgaattcttcgatgattataaaataattcaatgtattttataatatctgctttggcttcttctctggtttgatagttgtaatgatgcactaactcatttttcagtattccccaaaagctttcaatcggtgcattatcgtaacagtctccgcgcttgctcattgaaccttgaaaaccatattgctcaagtatatttcgatattcatggctgcaatattgacttcctctgtctgaatgcacaatcagttctttggttggtttttgattgtgaatagccatatttagcgcattacaaacaagctgtgttgtcatgcgctcatttaagctatagccaaccacttgcttcgtgtaaaggtcttttaccgctgctaagtacagccatccttcaacagtccatatgtacgtaatatcacttgaccatgcttgatttggtctagtcattgagaattgttgctccagcaggttttcatagatcgctcgattatggtcactattcgtagtccttttaaaacgcttgtgtcgcttacaatacaggtggttcagcgcttttatctgacgtacagcgtacatactcatttttatgccctgagcttgtaagtatttggttaatcgaatataaccatagctctgctttgtctcctcatgggctattttcaccaatatcgtctgttgatttcgttgaatcgttcttttgctcacgcctctcttgagccaatcataaaaacatgaaactgaaacatgaagtaatcgagccattaaggtaattggaaaagaatatcttttttgtttcatataggcgtaccttactgactttctttggcaaagtacgctgctgccttttttaaaaattcacgttccatttcagctattttgagctgttgtttgagttttttattttcttcgagtagagcgtttagatcaggtgaatactgttttgtacctgctaaagttccagcctttgctttggtattccaatttgaaagagtttgcattgaaatgctaagttgtctggctgtttccgagacattgccttgattggcttcaattaatttgatggcttcagctttaaattctgtggtgtaagtcttgtgtttcttgctcatggtaaactcctgatgagtgtgtttagtttaccaagttaaaacctcctgttttttcagcacacatcataagtatgtccatactttggctctaaacaggtcagcactacaccgcacttcttatatttaattccttctttgtcgatacggcttaccatatttaatagtatgctcaatgtagaagtaaacccaatctttcataagttcttcactcattcttaataaaaaacaactatcaactaagaatcgataataattcatttataaactattcaaaatgatagaattactcaggtttgaaagttggatatgttttgcttaaaaagcatgcagtctacaaatttttttaaattaattgaaaattaaatttgtagactgatttgtagactgttgaattgcaaaatacagcattgtggtacaagcggatgcaactttaattatgattaactatttgaaaatgcaagataaagcaaccgaatgcaaccattaacaattacagctagactgtcaggattctacttcctttattattccattgttggcacatttatgccgtattggaacttatatctccaagatcagggatttaattatcaagagataggtattttatcttctattgctattgtgacgcgcttctttgcccctttagtttggggctggatcgccgataaatccagtaaaagaatgctattagtgcggattgccacatggatggaggcatgtatatggttggctatttttataattcctaatacttttcagtcagttgctttattgatgcttatttttagtttttttcaaaatgctattttagctcaatttgaaggagtaactttattttggttaggagaccaaagggcgaaactttatggcaagattcgaaaatggggatcagttgggtttattgtaggtgtatttacaataggggcaattttagaaatcattccgatttcaatgttgcctatattattgcttatcattgcctcattagcatttatttgggcatttacgatacgtgaaccagaaggggccccaacttcacaaaagcatttagaacctttattgcctgtgctgaaacgtcctgaagttgctgcttttttcacaattgagtttattcttcttttttcacatgcacctttttatagcttctatagcaattttctgaaatcgttaaattttagtacaacggaaattggttttttatgggctatgggcgtggtttctgaaattgtgatgtttgcatatgcaactacgttttttaaatatttttcttggcgtagccttgtagcagtatgtttgattttgacaagtatacgctggttattagttgctattttctctcactatttcataggtcagttatttgcacagtgcctacacgcttttagttttggcttatttcatctcatcgcaatgaggcttatctttcaaaacttttcaatagggcaacaaggtcgaggtcaggctttttatagcaccatgtgggggcttggagtggcgtttgggagcattttggctggtcattactggaaaattcttacgggcgagcatatttttatgatcgctgctttagtggttctatttggtatgtgctttgtctattggttacctaaacaaatcgaaaagtcagtttcttagattaaatagtgataaaaattgttaggaatacagagttaaagatagaaattgtttgatgagaagtatcggttcgttacggttgaaaaatattgtttttatatggttatgaaacaatgtttttctaaaaaaatgtgctaacttaaacccatgcgtttaatgattaataaatctatgaaaaatatttatattatgggattattattggcttgttctggttttgctatggctgagacagtgactcaacagccaacagaacaacctgttcgcactgcaagtaatcctaatgctatacgtattgttacgcgtcctgaaattatgggattatggggaatggagattccaaataataaaaaatgtgtagagtattataatttccgcagtagtaacgatgtggtgattaaaagtggtgaagagtggtcatacggtatttatgaatatcagccatctgatgaccctaaagagcagctatcggctttagtaatgcaaattaagtttgataataataaagtagattgttctggtcagaagcaagatcagacaggtgatatttctcaatatttcgtgcaatggaaaaatgaccatactattaatttctgctcaacggctaagggtgagcaatgtttcgcaactttacgccgaatgttgccataaacaagtagatataaaaaagcctcttatttaagaggcttttttatatgaagcagattaagcagtttcagctttcttttcttcttccacttgctttaacaagtgtttttcaaggtaatggatgtccattgcttgagaacagaagtttttatcctgcaaaataagatctttatgtaaaggaatattggttttaattcctgtaagaatcatttcatctaacgcttgacgcatgcgggcaagtgaagtttcacgatctttaccatgagcaatcaattttgcaatcattgaatcgtaatatggcggaatgctatatccaggatagatatgagaatctaaacgaatacccgcaccacctggtgcatagaaactttcaattttacctggtgaaggtaagaatgttgttggatcttcggcattgatacgacattcaatggcatgaccacgaacttcaatatcttcttgttgaagctctaagcctaaaccagctgcaatacgtaattgctgttcaataatgtcaaccccagttaccatttcagttacagggtgctcaacctgaacacgagtattcatttcaatgaagaagaattcaccatcttcaaataagaattcaaacgtaccagcaccacgatattgcattaactgacatgcgtgtacacaggcttgtaaaatatcagcacgtgcttgttccggtagatttggagcaggagcttcttctaacactttttggtgacgacgttgtaatgaacagtcacggtcatataaatgaatcgcgtggccattaccatcacccaaaacttgaacttcgacatggcgaggtttttgtaagaagcgttccatatacacggtatcatcgccgaaccacatttctgcatcacgttgagccgcttgaactgactcaagtagtgtgtctacacgttcaacaatacgcataccacggccaccaccaccagctgccgctttaacaataagcgggaaaccgatttctttcgcttcagctaatgcgttatggatagttacagcatggtcgcagccaggtaccgtaggtacgccagcttttttcattgcaacaattgcagaaaccttgttacccattaaacgaatatgttctgggcgagggccaataaatgtgaaacctgagctttctacaatttcagcaaactcggcattttccgaaaggaagccataacctggatgaattgcatcggcaccagtaatttctgcagcagtaataattgccgggatgtttaaatagctgtcactacttgcacccggaccaatacatactgcttcatcaacgaaacgtaaatgcatcaaatctttatcggcatctgaatagataccaacagttttgattcctaatgttttgcaagcccgggtaattcgtaaagcgatttcaccacggtttgcaattaaaactttttgcaacatagatgtccccggggtattacgcgcgataacggaataaaggttgaccgaattggatcacttcaccatttttcactaaaatttcttcaatcacaccgctttgagttgcttcaatcgggttcatgattttcattgcttcaataatacccaaagtctcaccagcagatactgtttgacctactttaacaaatggtgcttcgcctgggcttggagcagcatagaacacaccaaccataggagaagtttcaactgctccacgtggtgtttttgcaacaggtgcttcagcaacaggagctgccggaagtgctacaccagccgcagcaacgacaggattgcgacgagttaaagcgatcgattgatcaccttctttaacttcaatcgcttgcaagtcagactcaatcattaaatcgatgagtttcttaattttgcggatatccatgggcgactattcctgaactagtttgggttagatggttgaattttttcaatagcgtaatcgagagcaaagctataaccttttgcacctagaccacaaatcacgccaattgctttgtctgataaataagagtgatgtctgaaagcttcacgtgcgtgaacatttgataaatgtacttcaataaagggaatggcaacgccaagtaaggcatcgcgtaaagcaactgaagtgtgagtgagggcagcagggttaataataattagttttacgccttctgtttgtgcctgatgaatacggtcaacaatggcaccttcccagttgctttgaaaagtatctagtgtaattgaggcttgttcagcttgagcaataagttgttggttgatattgtctagggtaagatgaccatatacttctggttcgcgttttcccagcaaattcaaattcggtccatgaattaccaaaatggtcgaactcattcagattgctccagctctaaagttgcaaataatctttgcaagatgtctgcaaagtttgcttattatggcatatgtttctacaagttttttataatttcttttaattgtcgcagaaagggtacaccaaattcggcttatatattgtaaattttgcgacgaattagcaatgttaaaaaatgacaaaatttcaagtaatttaacggagcttattttaaaccgaattgacaaaaacagttcatgtattttgtgtaacgggggtataagcatcttcaatcgttaacatttcattccagcgagttaggtaattttttgagcgatgacattgtttcatttgccaagatggattacgtgagtgatatccaacttgtaaatagtggctaccaaagcgcttacggactgtacctaaagtttccatcaattgttgtctttgatgaataagttccagaggctgccataaatcatcaatatgttgctgacgtgcgtgtagagcacaaaataatactccaatttttatgtaacttttattttctttatataaaacatcaatttgctgcatagctgctttagtaagtatgcataaatcatctgttgcataatgaagaccaattgcttgagatgtggcttttttatagggcggtttgtcggttttttcataaagcataacttgaacacaggcacaaagttgttcttgtttcattaaacggcgatgtgcccggttaaggtgaaagataagtgcttgtttaataatctcaatactggataaagcttgagcaaaacttcgtgatgctaaaatccgtttcgttggaatagctggatcatcaagttgaatacaggattggccttttagctcacgaatggtgcgtgccatgaccacagaaaatgcctttgccatatggtgttcattggcaaaagttaagtctaggcatgtgtacacctcataactttgtagctgtttgactaattgatagccgattccccatacctctttgactgatgtctgttgcatgaggtcttccataattaatggatctaaggtgatgaaattacatactcctttaaaacttttaattttcttagcatagtgattggcaagttttgcttgtgtctttgaatatccaattccaatgcaacaaggtaagcctaaccattttaggagagtgcttctcactttattgcagtagtcagagatatcgatagattggaggtaaggggtgagatgaataaagcattcatctatagagtaggcttctaaatcatctggagagaaaaactcaccgagaacagcaaaaaaacggcgggacatctcggcatataaagtgtagttgcttgaatagacttgaacgcctgcttgtaaagcatctttttcaatttggaaccaaggtactcccatttttattcctaaaagttttgcctcttcactacgtgagaccacacatccatcgttattagataaaacaactacaggtttatcattgagtttagggttgaaaagacgctcacagctgacatagcaattattaatatcaaccagtgcataaacttcacggtgtgagatatctttcatgatttcattcccttactcattaattgaaatctgcattttgaatttgtaacataatcaagttaacaaaattacagactgatatctaggggagtttcggttgttcgtcgaaattataggtaggagataaagtctatgaaatgtcagttattgatatggaaatgactgaaaatgataagttttaattggttatgatcggaaacataagagctatatttaatggatgagttgagtcttttaaatgtagtaatgcgtataacgcatttgtcttatgggtctttcaagctgtctttgttaataaagacagcttttttttataatgtgcttaagtattttttagagtttggcttgattgtagcaatcgagattaatgcattgtgcactcagttctatgatttgatcaggggctaattgaagtttttcccatttttgcatttgctgaaataaccaatggaaatcttcaggttggggagccgcattttctttaaccaagtactttacaatattttgaatcatataatatttatcgacatgtacttcttcagagcagtgaaatcggacaatcccaaactcgaccaataactttaagataggtgcaaaatcttttaaattactcaattctttttgagctttcataattgccgttgtaagggcaactaaggtttgaggatgttgttcagcccattcttgagttactgcgagaactttatctgccacattgggaataatgtcttgacttgagcagacgattttacttaaacctaaaagttcaccttgagtattccaaggctctcccacacaaaaaccatcaatcacatggttatctaaagcttcgaccatatacggtggcggaagtgctttgagtttgagcgtttgagctattctagagtctgccaaggcaagccattctcttaaacaataatgatggattgaatgtttaaatacatgggctagagaaagagtatgatcttgttcaatgtattgaataactttttgggcggtagtttgtgcattatcgctttcttgaatagccagttgataaattaatttttggcttaagctgataaaagcacggtttttacttaaaacgagcggggtttgcagtgcaataccaatttggtctgcacccattgctgctgcagggagcatcgcagataaacaatgtgcagcatctaataaaccaaaagctaaacggtcgcgtagacttgcccatgatgcttctttgactaaggtaacatctaaatcgacttcttcgaagaaaccttgctgctttgcccaaagtaaagcgatgcaatcaagtaaaggaatatagccgagttgcaattgagtcttttctaatttgctcatttattcatcctttagttgatcatttagtaatttttgagcgtcaagtaaacgccgtgccatttctccaatcgttatacggtgactcatggcattttttctgagtaattgaaaagctgtgtcttcaggtaagccatgcagttgcatgagtagcactttggccttttcaacatctttacggtctgccagtttggtttgagcttcttttaagtcaccttcgagctttttatgttttttatattgctcaattgaaatctctaaaatggtatgtaagcgggtggggtctatgccatctacaatataagccgttacgcctgcatctatagcttgtttgatggtgtctttatctgaatttttagtgaatagaacagttggtaggtcatagctactcacacaactttcaataatgtcacgatggggatgatccatatcgagcaagatgacatcggcttgtaaatcttcaagacgaaaaatatttaagtggtccaaagtaaggcaggcaaccacttcaaagtcattttcaagcagactattttttatatagtcggcccgcgcatgatcatcatcgataagagctattttgagttttggcataagttcagaaaatcaggctaagaaaatgcgccaattcgacgcgttttttgttattaagttttaagcaagattagtgccatccaaaattaaacaaaaaatcaggcatgagtggtcctttactatgccaaagtattgttttgaccaatattggtgcaaaaaagcgattcattttgtggcaagacttatttttgtttaaaccatatagacgagctgcaatagtgcagggaaaattaaatattctttttggataaaaatgggttttatattaagtggttgaaaataaaaataaaaaattattaatattaattttaaaaagaattggcatgcaaaatgcttagttaattacaggtcgaagacgaccataagttttaaagacggccaacgatgtccgttctgatcgaatttgtgagtgcaactgtacacacagaaaatttacgttcagtcggagtgaaggttatgtctttatttttattgcataaaaaagttacatctgaattaactaatttttcagtttcagcgatgcgagccttccgtatgagggggctcgctttttttatttgtttttatgactttgctatgcattgggtgtcgtcaacgagtggaaaaaatgggttccaagcagctatacgctttgtgatgttgatacgtttctcggtagagcacaaggcaaaacaacaatgtctatttgagaacgcaagaacgcagcttaaaagcaacgtgatttgaggagaaacactatgaaattggtaatgattggtcatggtatggtgggccacaaattcatcgaagccattttagaaaaagcagatgatgaactggaaatcacgattcttgcagaagaacctcgtatcgcatatgaccgcgtgcatttgactgaatacttctcagggaaatcggcaaaagatttatctttagcacgctttgattttgccgatgcgtatggcattgacctgcgtttaaatactaaagcagaggcgattgatacagctgcacaaaccgtaacaaccaatcatggtgatgtgattagctatgacaagttggtgctggcgactggttcatatgcatttgttccgccaattccgggtaatgaccgcgagaactgttttgtttaccgtaccattgaagatctagatgccattcgtgcagcaagtttaaaggctaaaacaggcgtagtaattggcggtggtttacttggacttgaggcagccaaagcattacgtgatttagatttagaaacacacgttgttgagtttgcaccacgtttaatggcagttcaaattgatgatttagggggcaaggttttacgccgtaaaattgaagatttaggtgtaaaagtccatacacaaaaagcgactcagtctattgagtctggtgtaaataccactcatgtgatgaagtttgccgacggtagtgaactcgaaactgatgtgattttattctctgcggggatccgcccacgggatgaattagcgcgtaatagcggacttgcgattggtgagcgtggcggtattgtaattaatgattattgccaaacatcagatcaaaacatttatgccattggtgaatgtgcgctttggcaaaataaaatttatggcttggttgcaccgggctatgacatggcgcgtattgcagcaaaacacattttagatgaagagtgtcattgcttcgctggcgcagacatgagcaccaagttgaagttgatgggcgttgatgttgcttctgttggtgatgcacatgctatgaccccaggtgcattaagctatttctatgcagatgaacatgcactggtttataaaaagattgttgtaaatgccgacaaaaccaaattgcttggcgcggttttagtgggtgatgccaaagaatacaacgaccttttacaaatgatgttgaatggtctggctttaccggaagtgcctgaaagtttaatcatgccgggttttgagcaatcagcagcaaaatctggtggtagcggagtcgatttactgccagacagcgcaacaatctgctcatgtaataacgtatcaaaagcagacatctgccaagcaattagtgatggttcgacctctttaggtgcattaaagaaatgcaccaaagcagcaacagcatgtggtggttgtgcaccattagtaactcaagtattgaagtcagagttacaacgtcaaggtgtgactgttaacaatcacatttgcgaacatttcccgtactcgcgtcaagagttgtatcacttggttcgtgtcaatgaaatcaagacatttgatgatttaattcatcaacatggtcatggtttaggttgtgatatttgtaaaccggcagcagcaaatattctggcatcttgctggaatgatttcgtacttaagccaagtcatgcaggtctgcaagacagtaacgactactacctaggtaacattcaaaaagatggctcttactccattgtaccgcgtatggcaggcggggaagtcactccggatggcttaattgcgattggccaaattgcgaagaaatataacttgtacaccaaaattactggtggtcaacgtgttgatatgtttggtgcgcaagttcatgagcttccatttatttgggaagagttaaatgctgcgggcttcgagtctggtcatgcctatggtaagtcgttacgtacagtgaaatcttgtgtaggtagcacttggtgccgttacggggtagataactcggttggtttggcgattgaacttgaaaaccgctacaaaggtttgcgttcaccacataaattgaaaatggcagtgtctggctgtacacgtgagtgtgcggaagcgcaaggtaaagatgtaggcgtgattgccactgaaaagggttggaacctttatgtatgtggtaacggtggtatgaaaccgcgtcatgcagaattacttgcatctgacctcgataaagaaacacttattcgttatatcgaccgtttctttatgttctacattcaaacggcagaccgtttacaacgtaccagtgtatggcgtgacaacatggaaggcggtctagactaccttaaatctgtgatcgttgatgactctcttggtttagcggccgagcttgagcgccgtatggaacacattattggtacatatcaagacgagtggcgtacagctgtcgaaaacccagaagttcgtaaacgcttccagacttatatcaatgcaggagcaaatgaacaagctgatccgcacattcaatttacaactgaacgtggtcaaatccgcccattaactgaagctgaacgttcagaagaccgtattccaatggttgaagcataaaggagagtttctatgaatattgtacaagacaaaaatatgcttcctgatgatcaatggattgacgtttgtgcactcgatgatttaaccccaaacacgggtgcgggagcgctagtgggcggccaagcggttgcaatcttccgtgtggggcatgaaaaacgtgtttatgtactgagcaataaagatccgtttagccaagcgaatgtgatgagccgcgggattattggtgatttacaaggcgaacgcgtcgttgcatcaccaatttataaacaacatttcagtttagctacgggccgttgtttagaagataaagaccaaaaattggcggtttatccgagcaaaattgttgatggtcgtgtttgggtcaatgcggtgccgcaaaaaacttatattaccaatacaggtgtatcacaagacaaacttagactggtgctgatcgggaatggtttggcagggatgcgttgtctggaagatttgcttgatatggcaccagaccgttatgaagttacggtgattggtgaagaaccatggggtaactataaccgtattatgttgtctccggttttatcgggtgagaaaaccattgaagacattatgttgcatccaccgaagtggtacgacgataaaggcattaaatttattgctggtgataaagccgtaaaaattgatcgtccgcgtaaagtggtttacaccgaaaaaggccagacagttgattatgaccgtttgattctggcaacaggctcggcaccatttattccaccagttcaaggtgttgacctaaaaggggtgttaactttccgtgatatttatgacgttaacaccatgattgaatactgtggttcaaaaactaatgcagtcgtgattggtggcggtttgctgggtttagaagctgcctatggattaaagcaacgtggtatgaatgtcacagttctacatttgatggaccgtattatggaacgtcaacttgatgggcgtgcgagtcaattacttcgtcatagcattgagcaaaaaggcattcaaatcattaccgaagccaatacagaagcgttaattggtgatgaaaacggtcatgtcaaacaaatccgtttgaaagatggcacagtgttagatgcggaccttgtggtgtttgctgtaggtatccgtccgaatattgctttggcgcaaagtgcaggattacgttgtaaccgtggtgtattggtgaatgacaccatgcaaacatttgacccaagtatttatgccgtgggtgagtgtatcgaacaccgtggtcaaacttttggtttggttgaaccactgtggggccaagcttttatttgcgcgacccatttagcagagcacggcagcttaacttttaaagcaccaactgtgccgactcagttaaaggtgagtggagtcgatgtattctctgcgggcaattttgaaccgaaagatgattatgaagacattattctgaacgatgaaaaacgccagatttataaacgcattatcattcaaaacgatcgggtaatcggtgcagtattgttcggtgatactgaagatggcatgtggtatgcagagttaattgcagatcaaactcctgtttcttcatttagaaataagctgctatttggtcgagattttgcattaaaaaatgcaggctaaatagggaaaggagcagttatgaatagtattccaagcgttgaaatcgatagctccgaccatgttgcaaaaatcactaaaacaacatgtccatattgcggtgtaggttgtggtgttagtgtaaacgttcaacaaaaacctcaaggacctgtggtgcaagttgagggggatgctgagcacccttccaactttgggcgcttatgtattaaaggtagccgacttgcggatactttggggttagaaacacgtttacttcaaccgatgtttggtcgtaagccacttcggactgtaaccacatgggatgcagcaatcaataaaattgccgataaattccagtcttgtatcgacaaatatggtcgtgacagcattgcattttatgtttcaggtcagcttttgactgaagactattatgtggtgaacaagtttgtaaaaggctatttgggcactgcaaatatcgataccaactcacgcctttgcatgtcatctgcagtggcaggtcacaaacgtagtttcggtgaagatattgtgcctgcaagttatgaagattttgaacatgcagatatggtggttttggttggttccaataccgcatggtgccatcctgtgctgtatcagcggattatgcaggctaaaagccacaatccagatatgtttgttgtggtgattgacccacgttttaccagtacttgtgagcaagcggatttacatttaccgattttaccgggccaagatgtcgcattgtttaatggtctattccaatatttatatcaaaatggtcatgccgatcaggtttttgtggatgcctatactgaaggtttgcaagaggttttggcaagtagtcagcaagaaacggatattgcctatgttgccaaacgcagtggtatttctttagacaaattacagcagttctttgagaagtttgcgcagactgaaaaggtaatcacgctattttcaatgggtgtgaatcaatcaagtcagggtgtgaataaggccaacagcattattaactgtcatttattaacaggcaaaattggaaagctcggcgctgcaccattttcaatgacaggccagcccaatgctatgggtggtcgagaagtgagtggcttagctaatatgttggctgcccatatggatttagataatcccttgcaccaaaaagtagtgcaaaccttttgggacagcccatttattgcaactcaagctggcttaaaagctgttgatttgttccatgctgttgaagctgggaaaattaaagccatctggattatggcaaccaatccagtggtaagtttaccagatgccgatcaggtgaaacgtgctttagagaaatgcgaattggtcgttgtgtcagatatctgtgtcgataccgatactacggcttacgccgatattttgcttccagctttaggttggggtgaaaaagatggaaccgttactaactctgagcgtcgtatttcacgtcaacgtgcttttttacctgcgccgggtgaagcaaaagcggattggtgggcaatgagtcaagttgcgaaaaaattaggctttaaaggttttgactttaataatgctgttgatatcttcaatgaacatgctgctttgtcagcacaagataatgcggacattgaagcacgtgagcaaactgatacgttccgttatttcaacttaaaaggtttaatgaacctaagtactgctgagtatgacgctctacaaccagtgcaatggccagtatgggataaaaaacaagacgctaaagccgttcaccaactgttttgcaagggccagtttagccataaaaatgctaaggcaaaactaattccgactgttgctattaatccggtacatgcaatttcagaagattatccgctcattttaaatacggggcgtattcgtgatcaatggcataccatgacccgtactggtttgtcgccaaatttaaccagtcaccgtgctgaaccattctgtgagattcatccaagtgatgcattaaagtttggtgtacgtgatcaaggcctggtagaagttcgttcgaaatggggcagttgtgtactgcgcgtgacattctcatcaggtgtccgtcgtgggcaaatttttgcaccgattcactggactgaacaggtcgcatccgacgcgcgtattggtaaagtcgttaatccggaagttgatgcaatttcaggtgagcccgagttcaaacatacgcctgtaactattcagccgttctataccacttggcaaggtgtgctctatattcgtgaaggatacgattcgcatattcaagaatcgctacatcactgtgcatggtggactaaagttaaaatggtgaaaaccaatcgctatgaacttgcagaccgccaaacttttcatgatactcaaaagaatctgaaaagctttttgccatttgccgatgaaacctttgaatggttaagcatagaagatatttcttcacaactgagccatagtattattttgaaagatggcattgtaattgcaagtctatatattgcaccgccagatttattgccagaccgtgactgggtagcaagtctgtttaaacgagaacgtttgagcgccttgcaccgtaaagctttactagcaggtatgccaatgtcggctaccaataatgatgggcctttggtgtgtagttgttttaaagtaggtaagaataaaattatcgaagcaataaaaacacaaaacattacccatgaaaaacaggtcactgcttgtttaaaagctggtggcaattgtggatcatgtttacctgaaatccgtggcttaattaaagcttgccagcaagaggtagaagtgtgaataagggatatcccataactgatctggtcattctggcgggtggacaagcccgccgtatgaatggtttaaataagctgttgcagcaattcgatggcgatacgcaacttcttaagattcaccaaaagctaaaatcttcagtatctgaaatttgggtaaatagtcatcgagactattcaatctatcaaagtattgtgcctgatattaaatgttttcaagatgatgcttccggttttttcggcccgcttatggggatgaaaagtgcatggtctcatgtacgagcagattatgttttgtttattccttgtgatgtgacctacatacctacgcaagtcgttgcgaaattacacagcgcacttcgcaaaaataaacaggctcaggctgcttacgtttcaattaacggagatgctttatacccattttgtttgttaaaacgtgaaagtctagaagttttagagcagcaaattgataagcaacaattgagtttaaaaaattgctttaaacttttacatgcacaagtagccatttttcaaaagcagaacttatttttccatagcattaattctttagatgaacttcaacaatacaaacaaattaaagcatttaaagagattttttcgacaaattagaacttcaatcatatcgatttaaaatttacattgataatctgaaatcattttttaaattttgagttattgactgtttagaatttaagttctattttggaacttgttattttcattctagcagatgtataaaaataaacggagccagaaaaatgatggatgcagctcagcaaagtaaaacagatgtgaccgcatgtattttatgttcaagaaactgcggtttgagcgtagaaattaaagataaccaatttgtcaaaattaaaggtaatcctgagcatccattttctcaaggttacatttgccaaaaagccgcaagattacagcattaccagaaacatgcagaccgtttgaccgcacctttaaaacgccaaccagatggttcatttaaagaaattagttgggatgtagcgatacaagaaattgccgatcaattggttcagattagagataaatttggcggtactgcttttgcttcggttgggggcggtggacagggtaaccacctcggtgcagcttatggccgacaacttttattggctatgaaaagttattatgcatataactcacttgcccaagaaaaaacaggtgatttctggctcaatggacgtttattcggtagtcaggcttgccatactacagaagatgttgaacatgcagattacgtactttttattggaacgaacccgtttcaggcacatggtattcccaacgcacgagacacgctaaaacatattaagaaagatccgaaccgaaccatggtggtgttcgacccgcgtgttaccgaaacggcaaaacaagcagacattcacgtgcagctaaaaccgggaactgatgcttttttaatgtcggccatgattgcgatcattattaaagaaaagctttatgatgcagcgtttattgagcagcatacacatgggtttgaagaagtaaaagctgcatttaaccatgtcccgattgaagactatattgctaaagctgatgtacctgtcgatttgatttatcacgttgttcgagatttttcaaaggcaaaaagaggctgtgtacgtatcgatttaggtattcaacatactttgaatacaacattaaatggttatttagaaaagcttttatacttgctgacagggaactttggaaaacagggtaccaataatttgcataccatgtttattccaattttgaccgatacggatgaaagaaaaccaaaatatcgacgtagcgtttatcataaaatgttcccgatttccgggtttttcccgcctaatattttacccgatgaaatcctaaaagcaggggaaaagcgaattcgtgctgtgtttgtagatagttgtaatccactattaacctatcctgatacaccagcttttgaggaagcatttaaagccttagatttgttggtggtagttgatgttgcgatgacagaaaccgcgagactcgccgactatattttgcctgctcatactcagtttgaaaaatgggaatttactggttttaacttggaatttcctaagaatggttttcacctgcgtcatcccgtattggctgctcaagcaaacactttaccggaagccgaaatttatactcgattactggaagctatgaatgctattccgaagagtttcccagttttagaaaaaatagctgcggtcgactcgaaaaaaactgcctacttaccctacttgtcggcgttaggaattaccttggcacgacataaaaaatatatcccttttgctgcctctattatttatcgaactcttggcaaacgacttggcaattcagcagattcagttgcttttttattgccgctatctattcaatatgctgttttacataccaaagcagtacgccgtgcaggttataaaggtaatccattaacacaaggtgtcaaactatttgagcagatattaaagcaacgttcaggtatggttttatcgcaacatgaatatgacgaagtctggaaactggtagcttataaagataagaaaatacgtcttgcaattcccgagatgttaagtgaactcgcaagcttgaaaagccataacgttaatgttgaagagtttcctttcatccttttgtcaggtgaacgccgtagttacaatgccaaccaaatttaccgtgaccctgcttggcgaaaagtagatgcagagggtgcattgcgtattcatcccgaagacgcaagacacttaaatgtagatgcaggagggcagcttaaatgtatctcagcgcatggagaaattcaggtagctattgagttggatgatgggatgagaagaggtgtcgtatcacttccacatggctatggtatgcgatttcaaaatggagaaccgattgggccacaattaaacttacttatttctgctgaacattgtgatccattgtcgaaaacgccataccataaatatgtacccatccgtttagaaaagtgttagaaatagaatcaagtaaaacatagattttaccgcgctaacccgagatttatttttaaattgttctctagacggtgcggtgaaaaacctataaaaagttaaatattatggaagataagtagagctggaacaaattttgcataaaaagcaaagcactatttaggcgcaatttttctatttgattgttcataatcggtgctcgcaatatttgaactgttctcgatatgagtgcaaatgatgaaacaatatcactctgaaactgcgccaagccttctgcaagatcaatatgggcgtatcaagcgtaagttacgaatttctgtaactgatcgctgtaattttaagtgtgtatattgcatgcctgagcatccagaatggttaaataaacaagacttgcttagttttgaagcgctctttcaattttgtcattttatggtgcagcaaggtatccaaagtattcgcattacgggtggtgaaccattaatgcgtcaaggtattgttcatttcattcgagatctacagtctttaaaaagtttaggtttaaaacgtatatcgatgactaccaatggtcattaccttgctaaacatgccaagcagctaaaagacgctggattagatgatttaaacattagtttagatagtttagatcctgttcagtttaaagagttgaccaagaaaaaattggaacctgttttagaggggatacaagctgcaaaagaagtaggattaccttttaaaattaactgcgtgttaatgaaagatagaaatgatgatcaaatcttacctatggtgaaatggtcaattgctcatcatattcctttgcgttttatcgagtttatgccgcttgatggtgatgcactttggtcaaataaagatgtggtaagtgaggctgaaattttacaggtattgcaaccgtattattcggtacaagtcatcgagcagcaacatgagccagcgcgtcaatatctaattaacggtagctaccatttaggaattatttccacaattacacattcattttgccaccaatgtgaccgtatacggcttaccgcaaaaggcgaactatataactgtttatttgcgccagaaggcttaaatattaagcctcagcttcaaacgctggtaagcaaacaacatactccagaatacggtatgtatatccaaaaattaaagaatttggttcatccttatatctggcataaagccaaaggtttccatgccttacaacatcaacaaacccgtaaaatcagcatgcatatgcttgggggataaatgcaacaatctatccaaattaaagtcgaagcatttggtgcaattgaaaaattgcttcctgaaaatcttttgttagtttgtcctagccatagtctagttaaagatgtattagatgaaattgttttattgcatccggaatctacaaaagccatggaaaaatgtgcatgtgcgattagtgataatgtcataaccagacaaactgtcttaagtgagccatgcactttggttttattatcacccgttgccggaggatgagtcatgaaagagttcgcaagaatacaagagcaggctttaagcttggatacttttgatccgattcagtcttttcctgaatgtggcggtatcgatatttttatgggtacggttcgtaatcatcacgaaggtaaagcggtaaaggcgctgaaatatacatcgtataaaccgcttgcagaaaaaatgatacgtgaaattgaactagaaattgagaaaaagtatcaggtatcttatgtgcgagtggttcatcggattggatatttagatgtcggtgaaacagcaatcattgcaattgcttatgcagcccatcgccgtgaagcttttcaagcatgcgaagaagcagttgagcgagtaaagcatgaagtacctgtatttaaagaagagttctttacagatggtacaagtcactatgtagaaggctgctgtattcgtaaggatgcaccgcacgaccacaaacaccatcatcatgccggccatgagcactcacactgaaatatgtaatactaggataaataatgaaaaacgtaggaatgaagccggaaagttatcgtgttgctgaagcacaagcgattttatatgcaccaccgcactgtattgaactattaagacaaggaaacacggaaaaaggtgatgcattaaaaacagcacgtgttgcaggaattttggcagcaaaacgaactgatgagctgattccactatgtcatccgctaccgatttatcgggcagatgtagaatatgaattggaacatgactttgtaaaaattattgctgtcgttgagaccattgggccaactggcgtagaaatggaagctttaacggcggcaagccttgcaggtttaaccatttacgacatgttaaagccccattgtgaaccagaagaactctggatggatcaatgtaaactacttaagaaaaaaggcggaaaatcccattttaaacgggtattgcgtcagcctgtttcggctgcggttattgtattgtcagataccgtagcagcgggtagaaagccggatacggccggaaaatctgtagttgaaactttaactgaagctggatttgatccgatccattaccaaattttgcctgatgaagcagatgatctcaaagaattggtcctagaactcaccaaatcgtatgcttgtattatgaccgtgggtgggacaggaattggtaagcgtgacattacagttgatacgctagagcctcttttagaacgtaaattagatggcttaatggaagctgctcgctcatttggacaaaaacgcacgccatacgctgctatgtcacgcggagtagcagggtttattgaccgttcgttagtagtgacgttaccgggaagccgtggtggagcaagtgaatcaatggctgctattttacctgccttagtccatatttttgatgtttgccgtgatttaccgcatccgggaggctatgaataatgtcaggttgtggtgctgagcatggattaatcagtatagatgaagcgctagatttagttattaataagcctaaaaacttaagctctatacaaaagactctaaaaaatagcctaagtagttatcttgccaaagagatttactctgaaattaatctacctagcttttctcaaagtgcggtagacggttatgcactttgtagccatacagaagatttaaataatcaaaagttccaagtcacaggtgagattcgtgccggaagtgagagtcacgacatactcggtgaaggtcaggcaattcgtatatttacgggcggcaaaattcctgaagggacaacgcatgtagcacggcaagaaatcgtatcggttatttcggctcaagaaatttgtttaacggaatatatacgccctcaagccgatatccgctttaccggagaagaaatccagcaagggcagttacttgctcaagtaggacagtttctaaatattggaagcttggctgctttaagtatggcaggtgtacaagaacttactgtatatcgtagaccaaaagttgcagttttagtcacaggtgatgaagttgctcaaacggcagaagatttaatcgatggaaaagtctttgatgcaaatggtccattactaaaagcttggtttgaagattatggtttagatgttgaactcattcatgtggcagatgaagcagatcaggtcacccattactttaaccagctaaaagacagccatgatgttgttataacgactggcggagtttcggtaggagactacgactttgttcggccctgtgctttcgaagttgggtttgaacaaatcttttggaaagttaaacaaaagccgggtaaacctttattctttgccgaataccataattcacaagctagccattcctgttatttgttaggcttaccgggcaatccggctgcggtatatgtcgcaatgcaagtttacggtaaatctttgcttgatgcattgcagggcaatagacatggaccagaatggtttaccgcaattttagagcatgatttaaaagaagatgcacgtgagcgttttttacgaatgtatgcttattttgatgcaggacaacttagggtgaaaagtttggccaagcagcagtctcatatgctgagtaaccttatgcaagccaattgtttagtccgtattcctgcgagtacaaaactagcatcaggaactgtgctaaagggaatctttatttcaaattaacttataaataagctgtatataattaatccatactgatggattaattatattttataactatttttagtgactgttattttaaaaaataagctttataaatatactaaaaacttatttctaagctgaatattgcatataacatattaagtggtttagggtataaataataaggcaagtaggccagttttatattgaggaaagcataaagatgaaatgggatgacatcggtgatcagccttgttctgttgcccgtatgctatcagtgattggtgatcgatggacgatgctaatattacgtaatgcttttatgggaattcgtcgttttgatgactttcaaaaatcattaggtgtcactcgtcatgtcctttccgatcgcttaaaacggttggttgaatacgaaattttagtgaaagcgccttattttgaccgtcaggaacgctttgaatatcgtctcacggataaaggctttgagctttatccaattatcttatctatggcgaactgggcagataaatggatggaccaaggtttaggtaaacctttggaatatcgtcacaaagcatgtggacataagtttgaacctgttatggtgtgttcagtatgtcgtgaaccattacatgcaaaacaagttcaggtttcggctgggccgggctattttgcttatatggaacaaaagcaaaaacaggcttaaacttgtttctctaatgactcttgtagaagcgcttctgcaagagtcttataaatataatcatgatttgattgtgtaatattaaaacggataaattgacctgccgattgtgcttggctaaaggcattacccggggcgagaatcacttgccgattcaggcaaaaacgggcaatcttcgctgcatctacaccttccggtagacgacaccacacaaaaattccggccttgggctcaatccacggttctatcccaatcgatttaagcttcgcgattgtttcttgcatggcttgagctaaacgaacttttaataaatctagatgcttacggtatgaaccatcggttaaagctgtgtgtaaaatcttggctgagagtccattgtgagaaaagctggtggctatttttaaatcggtaatttgatcaatccattctggtttcgcaataatatagccgcagcgaatagaagcagagagcgttttagagaaacttccaataaaaatcacgcgtgaaaggttgtctagggctgcaagtcgtggagcgggagtatattcaaaatctgagaagatatcgtcttcaatcacaattaaattagactgatcaatcaactttaataattgatgagctgtcgagagtgagagtgttgcaccagttgggttgtgtattccggaatttgtaatataaagccgagggttatagctctcgatagcttctttaaatgcctctaagtccgggccatttggagtgtagggaataccaacaactttaacttgatgaactttaagtagagcatgaaagttaaagtagcaagggtcatcaattaggactacatcatctggtttaagtaaaaaacgacaaaccagatcaatagcttgagtgcctgaatcggttagaagaacttgattaaggtttgcctctatacctttactttgtgcccgtctagccagtagatctcttaatgcgggcagccctaacggtgaagaataacccaataaactatcgtcttcgctacgtgtggctgatcttaatgctttgcggatactttcaagtggcatccaatcatttggtaaccaaccacaaccgggtttaaacgcattaggttctgcttctaaagactggcgtgaaatccataacggatctatagagcgatctaatttgggtcctaattcacttaaggctaaaggtgcaagtggtgccacgacataaaagccggaaccactacgtgattcaattttacctagggcaattaatcgctcataagcttcgacaatagtagaaacagaaaaacctaaatctttggctagtttacgtacagagggaagtcgggttcctggagttaaagagcgattcttaatttgttgttcaatctgtgaaataacaagttcgatttttgttttggtctggttcacactatttatctctaactgtactgtttgcttatacataacagttttttaaaattgtactgctttgtatctggttttgacaccatatcacagcttaaattcttcgtatagttgcggagaataatatgcaaaagtttatgaacggttgggtgaatggttttattggggttgcaatttttgctggttcattaccggctacccgtgttgcggtaacaggttttgagcctggttttctaacagcagcaagagctgtcattgcaggagttttgggtttaattcttatctttttgcttaaggaaaaaaagcctgctaaacaagattggtggccactcgctattgtggctttaggcgttgtagttggttttcccttatttactgcgcttgctctacagtatatgaacgcagcccactcgattgtctttgttagccttctaccgctcgctactgccatatttgcagtagtgagaggtggagaaaaaccaaatttatttttttggatatttgcaattttaggcagtctggttgtttttacctatatgtttttcttatcgggtgaagcttcttttggcatcggcgatttatacatgcttattgcaattattttgtgtggatttggctatgcagaaggcggagtactttcgaaaaaaataggtggatggcaggtgatttgttgggcacttattttagctttgccgattatgctgcttgctactcttttttatatgcccgtttcctttcaagatgtatctacatcagcggtagcaggactggtttacgtatctttatttagtatgctcatcgggttctttttttggtacaaaggacttgcacaaggcggtattgctgcaattagccagctacagcttttgcagcctttaatgggacttgcgattgccgcacttttattacatgaacacgtaagttggtcgatgttaatggtaacggcagtaacaattttatgtgtcgctgccgctaaaaaattcgcataaaaatttataaacaatttgccggtttaggaatacctgccaagcgactgagatggcgagcaactaaaccggtattaaatttttgctgtaaaacagcattattaatatctgggcttacggttttcattaaaaacttaatcaaaggacgtgttgcaggagaatgcccaaattgctgataaaattggcgaaccgcagctaaaacttcaaaatgccaatctgttaattcaagatcgagagatttggcgagttcctgtgctacttcgggattccaaatcgtatagtcgactaaatgaccatcttgatctaattctaaattcataaaaatgagcctaactatattatttcaaagaaatgcaacgattaaattgtaaaaccagatccgcaaactgatcatagttcaataccttaacctgagccaaggtttctgcatcaattaaatctttttcatgagacaaacaagaaactgagccaaactgctgacaaatatttaccgaaagttgagcagttgagtcacccataaaaacaatttgatcatctttatgaaatagctttgcaagttcttcaataatacgaggagtatggtgataagaagcttgcacaagataaagagttgattgcgtcattaaaattacacctttatctaccaatataagacatgatcgaaagactggatgagttcagtatctaactgaacaaattctagttcctgctcgctgttttgaacaaatggatgctgtttgtttttggcttcaataaggattggacttaagtcataaaactcaaagctatccaccatgtttgaagcaattttaaaagcatgctgcaattggtcaaagttacgttcattttgtaaaagactaagagctgcatcttttaataatactttgactggtgagccaaaggttgctaaaaccatagtagcggcgaggctttcattgacttgtaggctggttagattggcttgggtcaaaataacgagtacagttttcacacaatataccttttaaaagcaacaatctaagttaacaaagtaacttaaaattgaagaagacgagaggctgactgtactgcatcagcaagttcacctagaccaaccaactcaaagttgttcgctaggttgtgatgactaagttgatggcgactcgcattttctgcatcggtaatcccgcgtgcaagagcagcgctaacgcaaacaggaagtctgatcgagagcttttgccattcatgcgttaaattacgctggtcgtcaggaacccactgaaaatcattcgcaacttgaacgccatcttggtaaaagaatacacgaaagtcttcatttttacttttgagtgcctgagctaggcccagcgcatgccaagcatggatcgaagtaggagcagaggttattagtagtaatgtactcattgagaattcactatggtcatacgtctaaatgggcgtagatacattaagagaaaggtaagtatacaatgattttagtgacaggtggtttaggctttatcggttcacatattgcattgagtctcatggctcaaggccaagaagtggttcttgtcgataatttggctaactcgaccttgcaaacgcttgagcggttagaatacatctctggtatgtacgttccgtttgttaaacttgatgtacgtaacacgcctgcattgaacaaagtatttgaacagtactcaattgatgcagtcattcatacggctggttttaaatctattgaagagtctaatttaaaaccgcttgaatattataatgataatgtcagttgtattatgagcctattgcgtgcaatgcaacgtacaggcgtccgtcattttattcatttatctagtttggcagtctatggaaaatctggttcacagttaagtgaaacagatgatttcaactatgcttatcctaacccttatattaagtcgcaacagatgattgaagaaatcatccgtgatacttacaaaattgatcatgaatggaaaattgcaattttacgtctatcaaatattgtaggtgcttttgagcatggtgtattaggcgagtatgtagcacagctccctaaaaatattgtaccgcttgccatgcaagttgcagcgatgcaacgtgatttaattgagttacaggatcagtcttctaccgaagaccataccgtagaacgtagctttttacatgtattagatgtatgtgaggcagtaagctcaactttacattggttacgtgatcaaacccattgctgtgaagcttttaatattgcccatgagcaagtgcattcgattcgtcaattattagatgaaatttcacaggttacccaagccgaaattccgacacaatctgcgatttataagcatgaagagttagcgcagattggtgcaaatataggaaaagcaaaaactttattacaatgggtacctaagcgaactttaaaacaaatgattgaagatgaatggagattttatcaaaatacattaaatggaagatgagataatgattcttatttacaataatggaatgcttgagtacgatactaaaattaactagccaaagcataaattgcttcagcccgtgagttctttaaccagataaccgaggtttctatgcaaacacgaattgaacatgacacaatgggtgagattgaagttccgaatgaagcgctgtggggtgcacaaacccaacgtagcttacagaactttaaaatcgggcaggagcgtttaccccgtgccatgattcgagcgatgggcttggtaaaaaaagcagcggcaataaccaatgcagagttaggccagttaccacaagatttgagccaatatattgtgggggcagccgaggaagtgattgcagggaaatgggactctcagtttccactcgtggtttggcaaacaggttcaggtacgcaaagtaatatgaactgtaatgaggtgattgcaaatattgcaaatcaaaagctaggccaagcgctcggagcacaaaagccggtacatccaaacgatcatgttaaccgcgcacaatctactaatgactcattcccaacggctattcatgttgcggcaagtttgcaaattaatgaattactgatccctgctgtagaacagcttaaagcgactttgcaaaaaaagtcggacgaatttcaagatattgttaaaattggtcgtacccatttacaagatgcgacgccactgacacttggtcaagagtttagcggttatgtttctcagctcgagcatggtttagtacgtttacaacaagctttaagtggtctatatgagttgccattaggtggtacggcggtaggaactgggttaaatgctcatcctgactatgctgttaaggcagcagctcagcttgcagctttaacgggtttgccatttgttacggctcctaataaatttgaagcacttgcaggacgtgatgctgctgtttttgcatcaggtgcattaaaaacactagcggtaagcttaaacaagattgccaatgatattcgttggttagcaagtggtccacgttgcggcttcggcgaaatccgtattcctgaaaatgaacctggttcaagtatcatgccaggtaaagtgaacccgactcaaagtgaagccatgaccatggttgttgctcaagtacttggcaacgataccactattaatgtcgctggtgcttctggtaacttcgagctcaatgtatttatgccagtgattgcttataacttactgcaatctattcagttgcttggtgatgcatgtaatagttttaatgatcactgtgcagtagggatcgagccaaatcgtgagaaaattgatcatttcttgcataattctcttatgttagttacggcattaaatccggttattggttatgaaaactctgcaaaagtggcgaaaactgcttataaagagaataaaactttaaaacaagttgctgtagagctaggacttgttacagcagagcaatttgatgaagtggttaaacctgaaaaaatggtttcgccaaatagtaaataagcgatttaacaatagccatcagcagtatattttgtagcgattttacaaactcttaactactgatggctattatgcttaagatgttaaagttagggccattcatttaccctaagttatttattaataataagagctataccaatagatcttctatatattcccagccattagctttcatctcttcaaactttctttttaattcttcttttgtatattcatgtgagtctttagctaaaagaatatgataagaattagatgctggatctatagtgacctcattaatttctactggctgaatcacaccattttcggtcaaaccaagatcagtaaagcacattccttttaccggaataacactgcattcatactctttagaaataaaataattatttgaataagttgaataggtacgtgaagcgcgaatcttcattgctatctcctttattcgtagagaagatttgagtagtgtggcgcgttttaaaagctaaaactgtttactttttattgtttgtttactatgaatctttgttatttaaaatatttttaacaatctatatcaaaattaactgtagaaccctcctttttaaaagaaggcttcaatatagataagcttatcttgagattttgtaaactttatttttatattcatcacgagaaatgacacctttatcatattgttgttttaatgatctatattgttgataacgaacatctctttgaaggcccatattgtcatgacttctaatgtaatagagacttcgttcatgatcactcatatttacagtatggtcgggagagtgagaataagtgttttgtggttgctcttcttggtagtgttttgcaatctcaaaaaaatctacgttttgtttgtttgaatcagagcggaaaggattgtgttgtgattcgttaattttatgatctgaactattatttacctcaagcatactcttatggcgttttgactcttgtccataaaattcatatttggttggggagatagttgtttcagaaaatacaaaaggagaaaaagtagcagtacttaaaactaataaaattaattgtaatctattcatttctatggaagcccagatgaaagtgagtaaatcactgtattataacactaaatttaacattggactaaaaaataatatatttaaaatatacatatttttaattttcaaagttgtataagatttatttgcaagtttctaggttgtaattattccctattaagctttatcaaaccaacttggtgttgaataagctgccataattgttaaaatgcccaccttatcctgtttttatattattttttaattgctttcgttcttgcaatttttaaattaattatgaaaaacagtcgtttagttaaggatttttttgaatgctctctatttatttaacagatactcaacaacatgtgcaatttaatgattacccaagtgatcagcctgttaaatttctgttaaatcttaaaaagatttttccaagtactggtgatttattattacctgttttacctgaagataatgatctggaaaatgtaacttgggaatcaacctcaaaagactttgaaatcttcaaaaagttattggcaggttggggggtgattgagcttcgtttaaatgccattaccgcttataaagataaaaattttgcaaatgagctaattaaacaagctcaagcgaaacgtaaaaaagtagcacaaaaaaatcatcaactttctctagttgcattggattatatttttatgcacgaaattcatgcactcattgatgctgaactgttcacaataggcgagaaattttatttgccaaccttgcgggagcaatggaaaggtaccgtttcggaccaagtgcttaatggaaagctctaatgaatatcaaaaggtgaattcttataattcaccttttttataattaaatcaaaagtttgtattttttattggtgggttatacaaaagtttacaagaaaagaatgcgtttttttaaaagtggcagatacattgcttatataaatacaaaattattgcgggagagaggttcttaagaacccgccgaaggagcaacaggcccggaaactctcaggcaaaaggactgtaataattaaaaaatctggagagcagcttaagatttataagcatggagaataaaaacttataagtcataaactcaccgaaggggaagatcgaaatactaaaaggtagtatttaggtcgaaactctcaggtacaaatgacagatgggctgtactgatgaaatgttcttgcatttcagaggagtctgttatgccacatgttattgtgattggtgcaggaatcacaggggttacttcagcctatgaattatctcaattaggttaccaagtcacagtgattgatcgccatctttatccagccatggaaacatcatttgcaaatggagggcaattatctgcttgtaatgcagaagtctggaaccagaaagcgaccgttataaaaggttttaaatggatgaggcaaaaagatgctcctttattattgaatccttcctttagcctacataaatatagttggttggttgagtttttgtctcatattaaaaattatgaagccaatacaatagaaaccgttcgcttggcattgcttgcgcgtaagcgcttgtttgatgtagctgaaaaagagcagcttcaatttgatttggagaaacgcggtattcttcatatgtatcatactagggatgattatgacatcgccaagcgagttaatgatgtcctaaataaagggactttagaacgttactcggtttcacctgaggaaatgaaatcaatcgaaccttctttaacgggtgagtactttggtggctattacacaccaagcgatgcaaccggtgatatccataaatattcaacctctttagctgaaaagactaaacaatatggcgttcagtacaaattcggtttggaagttactgatattaagtgtcatgcagataaagtggtgctgaattgtcagccaagtgctgagcatccgcatctttcccaaacagacagctttcaattagaaggtgatgttttggtagtgtgtggtggtgtaggaagttatcagttagctgatatgattggtgaacgtgtaaatgtttatccggtcaaaggttattcaattaccgtccaattaaaagatgaaaaaagtataaaaaatgcaccgtgggtgagtttgttggatgagagcgctaaaattgtaacgtctcgtttaggaccagatcgtttacgtgtagcaggtacggccgagtttaatggttataatcgagatattcgagccgaccgtattcaacctttggtaaattgggtaaaccgtaattttgacatttcaactgagcatgttgtgccttgggcgggtttaagaccaatgatgcctaatatgttgccagttgtgaaacagtctaaacagtctcgagttttctataatacgggacatggtcatctaggctggactttgtcagcagctacagctgttttggtgagtcaggatattcaacaaaagtatcccgcataaaaagaaaagccagtgtctatgcactggcttttttattttatattcactagtcgtacagacgataaattcctgtgaagcgctcacaacctttttgctgggtttttacgatgagcagtgctttctgaaagtcaaatttatatttacagttatgttcattatctaaaatttcacttttctgttcaggagagctgtaagccataagtgaaaccgtttgggtttcttttcggttattcggattacggtaagctaacccttcaattttgattttatctttagcaagttgatgtatttgtaaatgaacgggctgagatgcaatatgtccattttcaaatttaagataatgctgagttagggtttgtttaagtgaagcataaaaatttaaatcatcaccacgtacatcaaactgttgttgaatacatgaattggttttgcattgttgtgtttgtctaagccacaatgtttgagtatcttgtagaagctgcagtggggcatctgtgaccaagtatgcagaaagatatttattgttgagctgctttcgtgcttcgctaaaggtttttgaacagatttttagctctgcttttgagttggagcagtcgatagattctgcaaaaacaagcgatgagcataaacaactcaatgtcacgacaaaacttaatcttttcaattgattcatatcagtattcgacggcatgatcgcttatactttcagtctactttgctaagtgtactatagcgaaacacgacggttgaatacaagatttcttaagcttttataatagaagggaagagtttatatggttgctcaaattcgtattggacaaggaatggatgtgcatgcctttgaagagggtaacttcgtaaccttagctggcgttcaaattccgcatacgcatggcttgaaagcacattctgatggcgatgtcgtgctacatgcattatgtgatgccttactaggtgctctagcacttggtgatattggtcagcattttccggatacagatccagaatttaaaggagcggatagccgtgttctacttaaacatgtttatcaattaatattagaccgaggttatcatttaaataatgctgatattacggtagcttgtgagcgtcctaaattagccaaatacaatttggaaatgcgtcaaagcattgcagatgttttaaatgtagatttaaatcaaattagtatcaaagcgaccacaaccgaaaaacttggatttactggtcgccaagaaggaattttagcaacagcgacggtgttaatatctcattaaactaaatcattggtttgttgcaaagactgttgaagttctaaggtagccttacggccttgaagctgtaaggtaatactatgaatgagtcctgtccatgtttcatttggctcccaaatctcatgaagcaaatcctgacaggttggcatatccatattcatataaaattgtctgtagacatacataagacaacttacgcgtttatttttggcacaatgtatccaaacaatttcattctgcactaaatgatcaatcaaatctaaaactaataagcattggtcagaagagggtgtttcccagtcaattggaatatgaatataatttaaaccatattcaagacagacctgatcttcatttttaatactatctggtgaattcgataaagctaaatttataacagtgctacaaccatactctttaatgagcttaagttgttcgatagaaggttgcgctgaactaaataaatgttcatgaatgatcgaaaatgcagtgatttcagataatgattgttcaagggttgtcataatcgcactctacacgagtaggcttggcttattgtgtagaatgttatacacgattatgtgtgacagttgaaatataggctgtttatatattgggcaacatcataaaaatttttaaaataataaatgagggtaatagggatcttataaaaataaaaaaacagcaccttaacgatgctgttttttgaattagaaattaagcttttttcaaattttcgttgagtaaaaattccattaaagctttttgtgcatgcagacggttttctgcttcgtcccatactacggcatttttatggtcgagcatggtttcagaaatttcttcaccacgatgagcaggtaagcagtgcatgaataaacagtccgggtgtgcaagccccattaatttctcgttaacctgaaaatcagcaaaggctttttcacggagcttctgttcttcttcttgtcccatgcttgcccatacatctgtaacgataagatcagcatttacagccgcatcttccgcattatcaaaaagttcaacacaatgcccaaactctgctaaaaattcaggtttaggttcataactttttggtgatgcaatcttgagtttgaaacccatcatgtgtgcagcttcaatgtatgaattacacatattattgccatcaccaatccaagctacggttttgccttcaatgctgccgcgatgttcaatataagtttgtaaatctgcaagtaactgacaaggatggtgatcatcagttaagccattgataacgggaacttttgaataagatgcaaaacgttcaacaatatcgtgaccaaaagtacgaatcattacgatatcaagcatgcttgaaataacacgtgctgaatcttcaatcggttcgccacggcctaattgcgtatcacgtggtgataagaaaatggcactaccaccaaattgattaataccagcttcaaaagaaatacgagtgcgtgtgctcgatttttcaaaaatcattcccaatactttaccaacaaaaggttgatataccttattgctttgctgcattttcttaagttcgcttgcgcgttccaaaatgcgattaagttctagagtggatagatcacgtaaagtcaggaaatgtcttagagccatgtagctactccataataattgttttgaattacaacaattatctgttgttggctgggtggaagtgggaaaaaagaagtctactatactataagcatttcaaaatgcaaaagaattagactttatgatggccctttaagaaaatatcaacacaatagttaatataatcaataacttctgtctcattgggtggaagaggcattcccataatcattcgccattcaatatcacgtaaaattccaaaatacataagagaggaatgatcaggagatgtacaggtaatttcacctgattgatgagatatgagtaaggcttgagcaattgtattttggacatccagagcacatttttcatataagtattggctcaaagttgcattacattgagtttgttcaataaccaaacgtaaaaaggcaatgtgttcaggttgaataatgtgtttataaaaacggatgagagtttggattaaataatcttttaaagaagtttgctctggttgaaatgcaatgcagatatctttaaaaaacatttcacggcgataatcgcagattgcagtaaataagccatctttattaccgaagtatttataaatagaggtttttgaaccaccagcatgattgacgatgtcgtcaagagagacagcatcatatcctttttccaaaaacagctcggttgcgcttagcaatagagctaaacgacgttctataccgcggcgtgtttggggtttttcacatacgagatgatgtgactcaaggactggatcatgcataaaatttaataacgacggctaacactgcttatctagtatagcaaatctatctttaacgatggtcattggtatgtttttaggtcatctggtaaacaataagtagagcatagttttggggaaaatatagaaaatataatgatttatgtagaaatttagaattttttgatcatgtaactgtatgttcacattttagtttggcagttaattccgatttaaatagtcataaagaaaagtggctaaattaaattagccgctttttgatttttgcttcggttttaagcttctgacaaagttgctttatgttcgtcctcatcatcgtcatcagcagaatccatgcctagctcttttaactttctggttagggtgttacgaccccaacctaacagctcggctgcatgacgtttgcgcccacgagtttgctgtagtgctgcgttaattaaggtgcgctcaaacattggagtagcaatgtctaaaatcttcatttcaccatttttaagtttttgaattgcccattggcttagtagctcatcccaatggtgcaaagaaatacgttcaaaagatggtgctggttgactagtctcactacttttttggagtggaacctgtttaagctcagaaggtaaatcttccggataaacctcacgaccagtaatcatgacggttaaccaacggcaggtattctcaagctgacgaacattaccaggccaaggtaattgttgcatatagtccgttgtttcagtgcgtaaaatctttggacttacacctagctctttacccgcgcgagccaagaaatgttgagccagcatcgggatgtcttcactacgatgtgcaagcttcggaatatgaattcgaataacatttagacggtggtataagtcttcacgaaaacgaccttcattcaccagtttttctaagtcttgatgggttgccgcgacaattctgacatctactttaaccggtatatggccaccaacccggtaaaactcaccatctgcgagcacacgtaacaatcgagtctgagtttcaaatggcatgtcaccaatttcatcaaggaagagagttccaccatttgcttgttcaaagcggccttgatgttgggtgtttgcacccgtgaaagcacctttttcatgaccaaataattccgtttcgattaaatctttaggaattgctgccatgtttaaagcaataaaaggcttagcgcgtcgtggagaatgtttatgtaaagcatgcgcaaccagttctttacctgtgcctgattcaccattaattaaaacggtaatatgcgactgagataaacgaccaatcgctcggaaaacctcttgcatagcaggagattcgccaataatttctgttgattgtagtggtgaagctgtttttgtcgcttcttgctgctgcaatttattgatatgcaaaatcgctcgattgactagagctaaagcttcatcaatatcgaatggttttggtaaatactcaaatgcaccagtctgatagcttgatacagcagactctaagtccgaatgcgctgtcataatgataacaggcaagtcggggtgagagtttttcactttagataagaaagttaacccatcaatacctggcatacgaatgtcagttaagatgacatcgggcgcatcatgatgtaaacgttcaagtgctgtttgagcttcttcaaaattggtgacgtcaaatccttcttctttaaaggtcttttcaagtacccatcgcatggcgcgatcgtcatcaataacccatattttatttcgcgacacggtctgactcccaaggtaaatataagctaaacattgtttttccaggaactgattggcattcaatcattccgttatgttgatgcatgatgttctgtgcaatactcaggccaagccctgtgccttttgctcgtcctgtaaccaaaggatagaacacagactctaaaatgctttcgggaatacccggtccattgtcttcaatatcgactcgtacagcagagcggttaagtactccattaatagtgactagacgttgaatacgggtacgtaaaattaattcaggctcttgatctgtaaaaaatgatttattttctgtaatagcttgaattgcattaacgctaatattgagcatgacttgaatgagctgatctcgatcggcttttacatcgggtagagacaaatcataatcacgcgtaattttgatttttttcttggtctgatttgcgattaaagagcgtacccgttctagaggttcatgcacatttacattttcataacttggcaattgtcttgagcccaacatggtgtcggccaaattggtgagacgatctacctcgttaataatgatatccgtaaattcagcatagctctcgtcatttaaactacgagcaagtaactgagttgccccccgaataccagccagagggtttttaatttcgtgagcaacgcctcgaaccagttgtctagccacttgatgttgttgaattaggttttcttccttagaaattttcaacatacgatcaataggatttaactcaataagtaagagcgggtggtagcttttacctgcatttaattgcgagaccgtataatccacatgtaaatctttaaaattgacattaatgatggcttcacgacgtgtataaggttgtcccgtttttaacgtgttcaataaggcttcatgcgtattaaaggtatcatcaggtgcatgaagtaaatttaaaaccggttgtccagaagcgcgaagcaaactaatgtcaaaaagtgcttcacaagcggaatttaaataaaaaatattaaagttactatcgattaataaaatcgcagtagttaaattgtctaccaataggcgatagtcgataggtgtgtgttgatccattagcgaatcgttcctgtcttaaaatggcgcaatggcatcttcattggttatcggttttcaccgttatagaacatgattgatgcaaaatgtacgccaactttgtttatggtttattttaaggttttaagcgtaattaaagcgctctaaaatcgttcttaatatcttttggtcaaaaatacggatgtatacatcaataatatcatgactcaacttggtgcaatattgagttttggtgcaaatattggttgtattttggtgcattacacaaagagtggggtttccacctatgcttgagacgagaaaagacatacaatacgcgcattcaagtggagcgcagattcatgaagacccccaaagtcggttttgtttctttaggttgtcctaaggcattggtagattctgaacgaattttaactcagttaaagactgaaggttatcaagttgcatcagattatgatggtgctgatttagttgttgttaatacctgtggttttattgaatctgcagtacaagaatctttagatgcaattggcgaagccatgagtgaaaatggccgagttattgtgacgggctgtttaggtaaagacgaagataaaattcgtcaaatgcaccctaatgttctaaaagttactggtgcagcagcttatcaagacgttatggaagctgtacatgaatatgtcccagcaccgcctaaacataatccgtttattgaccttgttcctgagcaaggtatccgtttaacaccgaaacattatgcttatttaaaaatatctgaaggctgtaaccaccgttgtaccttctgtattatcccgagcatgcgcggtgatttagtatcacgtccggttggaagcgtattagaagaagctgctgcgttaaaacgtgcaggtgtaaaagaaatcttggtcatttcccaagatacctcagcttatggcgtagataccaaatataagctcgatttctggaacggacagcccgtaaaaaccaaattctttgacatgtgtgaagcacttggtcagcttggaatttgggttcgcttacattatgtatatccatatccacatgttgatgcagtaatcgatttgatggctcaaggtaaaatcttgccatacctcgatattccattccagcatgcaagcccacgcgttcttaaattaatgaaacgtccggcgcatagtgaaaatacattagaaaaaattaaattatggcgcgaaaaatgcccggatcttgtgatccgttctactttcgtggttggctttccaggcgaaactgaagaagacttccagattttgctcgattggttggttgaagctcaacttgatcgtgtaggctgctttacctattcaccagtagaaggcgctacggcaaatgatttaccagatcatgtgccagaagaaattaagcaagagcgttacgagcgctttatgcaagtgcagcaacaaatctctgctgccaaattacaaaaacgtattggtcaaacgatgactgtattggtcgatagtttggaagatgaatatcctgttgctgttgcacgttcttatgccgatgctccggaaattgacggtaatgtctttgtagaagatatcgataagagcactattcaaccaggcgatatgttggaagtcgaaattaccgatgcggatgaatacgacttatttgcaaagttaattaaaattaaatcggtctaatcgaatcgcgattcaaaaagcattcagtttaagaggtcttggagcaaaatcatggcggaaacaatcagcccccgttattcacgaattttattaaaattatctggtgaagctttatcaggtaataaagatatgggtattgatgctcaagttttagatcagatgtcactttctattgcacatttggttggcttgggtgtgcaagtaggtatcgttgtgggtggcggtaacttatatcgtggtagccagttacaaaaagacggtttggttggccgtgtaacaggtgatcagatggggatgcttgcaactgttatgaatggtttggcaatgcgtgatgcattggtgcgccgtaacatcagaactcgtcttatgtcagcgttaccaatcggtactgttgtagagtcttactcaagtcgtgatgcgattcgtcatttaagccaaggcgaagtgtgcgtttttgtagcaggaacaggaaatccattctttacaactgatacagcagcatgtttacgtggtattgaaattgaagcaaatttaattttgaaagcgaccaaagtagacggtgtttataataaagatccgagtaaatacgaagatgcggtgaaatatgaccatttaacatttgaccaagtgttagatgaaaaactgggtgttatggatttaacggcaatttgcttatgccgtgaccataatgttccattacaagtatttgatatgaataaatctggtgcgctattgtcagtggtaatgggtgaaaaagagggtacacgcgttactaaataatgtacgtgtgccgtaaagctctttatactagcgctaaattaaatttgttatatacatccttgaataaataagtaaggaagatcatatgattaacgatctgaaaaaagacagcgaacagcgtatgttaaaaactcttgagtctttggaacaagggtttgctaaagttcgtaccggccgtgcacacccatcaattttaaatggggtaatggttccttactatggttctgatgtgcctttaaaccaagtagcgaacgttggtgttgaagattctcgtacgcttatcgttcaaccatttgaacgtacgatggttgctgcaattgataaagcaattcgtgaaagtgatttaggtttaaatcctattactgctgattcaatccgtgtacctttgccagctttaactgaagaaacacgtcgtgatatgcagaaaatcgctcgtagtgaagctgaaaacgcgaaagttgctatccgtaatattcgtcgtgatgtattaggtgatatcaaggcattgttaaaagagaaagaaatttctgaagatgatgagcgtcgtgcaggcgatgatatccaaaaaatcactgataaatatgttgcagaagtagacaagcgtctagcagcgaaagaagcagaattgatgaaggtctaatttttatgaccgattcagaagagtatcatcttcctcagcatgttgccatcatcatggatggcaacaatcgctttgcaaagaaaaatcaaatgcaaaaaggcgatgggcacagagagggtaaaaatgttcttgaccctattgttgaacattgtgttaaaactggcgttcgtgctttaactgtttttgcattttcgagtgaaaattggaatcgaccacaatatgaagtcgatctgcttatgaaacttcttgaagaaacgattcatgagcaaatacctcgcatgaagaaattcaatattgctttgcgctttataggggatcgttcccgattaccttcacatttagttgccttaatggaagatgcagagcaacaaacagcacatcatgacgccatgacattaactattgcagtaagctatggtggtatgtgggatattgcaaatgcagctaagcaggttgctcaagcagtttcccgtggcgaaattgacgctgatcaaataaatgttgatttgttcgaaaaatatgtcagtctaaacgatctgccagctgtggacttgttgatccgtacaggtggagatttccgtatatctaacttcttgttatggcaagcagcttatgcggagctgtattttacggatactttgtggccggaatttacagtggaagaattcgaccatgcattgaatgtcttttcagggcgtgaacgtcgtttcggtaaaacatctgaacaaattcagcaagagaaaatcgagaaattataatgttagagcggattgttaccgcattggtacttgttgcagttgttttgggctgtatgtttgctacgcaatcacattatccaatgttggtacttatgattgtagcagcaggagttgcggggtatgaatggtataagttaatgcctcgggaagttggtgcagtagtaaaacctaaagcttggggttatggtctacttgttgcctttgtttctggtgttgccttattctttcatgacattgctttactgttatggtctgcttcaattttaacttggctcgttagtgtttattgggttaagtcttttcctgaattcgatgggtggtataacgcgaccctatatgtcattggtttgattcttatctgtgcagcagtgactgcaatctttgtagtatggcaaagctcaccatggtggttgatgtatttgttcttgcttgtgtggggtgcagatagtggagcttactttgtaggccgtaaattcggtaaaagaaaattggcgcctacagtaagtcctaataaatcagtagaaggtttatatggcggtattctcactacaattattgtaatgcttgtggtgcaatatcaatatttaaacctaacttgggttcaacaacttctattcttgattttgtctttaattacagtgttcggttcagtattaggtgatttatttgaatcaatgatcaaacgccgtgctggtattaaagactctggccgtgttttgccaggtcatggtggtgtattggaccgtattgattctttactcgcagcagccccgatttttgcaacgggaatgtatatattaaagcttattggtgtagatttatagatgacacaatctgtttgcatattgggtgtaaccggttctattggacgaagtaccttaaaaattttaggtcaacatccagataagtattcagtctttgcagtttcggcgcatagtcgaatttctgaacttgttgaaatctgcaaacagtttcgacctaaagttgttgttgttcctgaacagaaaatagttgaactaaaaacactatttgctcagcaaaatatatcggatattgatgttttagctgggcaagagggtttagtcgatatcgcatctcatactgatgtggatattgttatggcggcaattgtaggggcagctgggctgttgccaactttagcggctgttaaggcaggtaaaagagtactacttgccaacaaagaagcattagttatgtctggtgaaatcatgatgcaagctgctcgtgatcatcaggcattgttattgccagttgattcggaacataatgcaattttccaatcattgcctcataattatttacaagcagatagaacagggcaaccacagctaggtgtatctaaaatattgcttacagcatctggtggtccctttttaaatcactccttagaacaattgactcatgtaacgccgcaacaagcatgtaaacatccaaactggtcaatgggacaaaaaatttcggttgactcagctactcttatgaataaagggttagagttaatagaggcttgtcatttattttcaatatctgaacattttgttacagttgttgttcatccacaaagtatcattcactctatggtgcagtatgttgatggttcaacattagcacaaatgggtaacccggatatgtgtactccgattgcacatgcattggcatggcctgagcgtttacaaactaatgtacctgctttagatttatttgagtattctcaacttaattttcaggcaccagatacccaaaaatttcctgcattaaatttggctagacaagcaatgcgtgcgggaggtttggcaccaaccattttgaatgcagctaatgaaattgcagttgaagcattcttaatggaaaggattggatttacaagtattccgcaagtggtagagcatactttggaaaaattagagaatgcagcggctgaaagcatcgagtgcattttagataaagataaagtggctcgatctgtagctcagcaatatatatcaagtattggaggctgaaatgaatgcactgtttatgattgcagcggcagctcttttacttgggcctctaattgcaatccatgagtttggccattactgggttgcgcgaaaacttggtgttaaagttttagtctactcaattgggtttggaccaactttactgaaatggacgtctaagaagtctggtattaaatatcagctttctgccttacctttaggtggctatgtcaaaatgttggacgagcgagaaggtaatgtggcagaacaagatctaccatatgcttttaaccggcaaaaaccgtggaaacgtatagcgattgttgctgctggaccattaattaacttgatttttgccgtactcctcttttggattttgtttttaccagcccaagaacaattaaatactaaaattggcaaaattattccaaactctccagctgcagcagcccagttacatgtaggtgacaaaattattgctgttgatgggaaagagacagcaacatgggaaaagctaaactttgctttgattgatcgagttggggaaacaggtactgtaaatattgatgtggaccgtgctggttccgaaaaaaattttgtattaccaattaaagattttttaaaaaatcaaaatgaatctgcactggacgtattaggtttcttaccttatcgacctgtgattcctgctgttgtaacagagttaacggaagatggtgcggcgattcgtcaaggaatgaaagtgggtgatcgtattgttgcgattgatggccagcctatgaaagattggttcgacgtggtagaagttgtccagcgttccccagaaaagttacttaagattgatgtcttacgtcatgaacaactagtacatttacaagttatgccacaaggtaagcgtgatagcatggggcaggtaaatggagtacttggtgtaaaaagtgatgctggaaaaattacaattcctgacgaatataagcaaacaattcaatatactccaatacaagcttttgaaatggcacttgataaaactggccaaatctctagcatgattttgaattcaatagtaaaaatggttaagggactaattggattagaaaatctttctgggccaattaccattgcaaaagtagctggccaaagtgcagaaatgggttgggaaacctttatctcttttatggctttaatgagtgtaagtcttggaattttaaacttattaccaattccaatgttagatggtggtcatctagtgtattacattattgaagctattcgtgggaagcctgtttctgaacaaatacaaatgtttggtctaaaaattggtatggtactgctcggtagtatgatgcttttagctttatttaatgactttatgcgtttgtaaacgtatatggatttataacttactggaaaaaactggcatgcggcacacacattttttaatgcctttggcacttgttagcgctatggcagcggtacaacaagcatatgcagctgatgatttcgttgttagagatattcgtgtaaacgggttggtccgtcttacccctgcaaatgtttataccatgttgccaatcaacagtggcgatcgcgttaatgaaccgatgatcgccgaagcaattcgaacattgtatgccactggactttttgatgatattaaagcatcaaaagaaaatgatactttggtttttaatgttattgagcgcccaattatttcaaagcttgaatttaagggtaataaacttattcctaaagaggctttagaacaaggccttaaaaaaatgggtattgctgagggtgaggtttttaagaaatctgctttgcaaaccattgagacagaattagagcaacaatatactcaacaaggccgttacgatgctgatgttacagttgatacagttgctcgtccaaataaccgcgttgaattaaaaattaattttaatgaaggaacgccggcaaaagtctttgatattaatgtaattggtaatactgtttttaaagacagtgaaattaaacaagcatttgcagttaaagaaagtggttgggcttctgtagtcacacgtaatgaccgttatgcacgtgaaaaaatggctgcaagtcttgaagctttacgtgccatgtaccttaacaaaggctatattaattttaatattaataattcccaactcaatattagtgaagataaaaagcatatctttattgaggttgctgttgatgaaggtagccagtttaaatttggtcaaactaaattcttaggtgatgcactttataaacctgaagaattacaagcattaaaaatttataaagatggtgatacctattcacaagaaaaggtaaatgcggttaagcaattactcttacgtaagtatggtaatgcaggttattactttgcagatgtaaatattgtgccgcagattaataatgaaactggcgttgttgacttaaattattatgtgaatccaggtcaacaagttaccgtacgtcgtattaattttactggtaatagcaaaacttctgatgaagtattacgtcgtgaaatgcgtcagatggaaggtgcattagcgagcaatgaaaaaattgacttatctaaagttcgtttagagcgtacaggtttctttaaaaccgttgatattaaacctgctcgtattccaaactctccagaccaagttgacttaaacgtaaatgttgaagaacaacattcaggtactactacattagcggttggttattcgcaaagtggtggtattacgttccaagcaggacttagtcaaactaactttatgggtactggtaaccgagttgcaattgatttatcccgttctgaaactcaagactattacaacttaagtgttactgacccttactttaccattgatggggtaagccgcggttataatgtctattatcgtaaaacgaagctgaatgatgactataacgttaacaactatgtaacggatagtttcggtggtagtttaagttttggttatccaattgacgaaaatcaaagtttaagtgcttcggtgggcgttgataacactaaagtaaccacaggtccttatgtttctacatatgtacgtgattatttattggcaaatggcggtaaggcaactagtaaaggtacatattgcccaacagatgcaaatggtaattctcaatatgataccgagaagggggaatgtaaagtccctgaagaaacttatgataatgcatttgaaggggaattctttacttataacttgaacttgggttggtcttataacactttaaacagaccaattttcccaacgtcaggtatgtctcatcgtgtaggtcttgaaattggtttaccaggtagtgatgttgattatcaaaaagtaacttatgatactcaagcatttttccctattggtagtaccggctttgtacttcgtggttatggtaagttaggttatggtaatgatttgccattctataaaaacttctatgcaggcggttacggttctgtgcgtggctatgacaacagtaccctaggacctaaatatccaagtgtaaatctacaagaaactaagcaaaatgatagttctcctgaagaagtaggtggcaatgctctggtccaatttggtacagagttagttttaccaatgccatttaaaggtgactggactcgacaagtacgtcctgttctttttgctgaaggcggtcaggtttttgatactaaatgtaatattgataactctgtttatggcaacaaaggtatgaagattaatggccagaccattacggatgttagaaaatattgtgaagataattatggatttgatttaggtaacttacgttatagtgtgggtgttggtgtaacctggattactatgattggtccattgtcacttagctatgcattcccgttaaatgataaaccgggtgatgaaactaaagaaattcagtttgaaattggtcgtactttctaagtacgatctttttgcataacgaaataaggaaagagatttatatgaataaattaaataaattaatgttagggttaggcctgacagtagcttcagtagcagctaatgcagctggttatggggtaattgatcttgctaaagttgttgaaagtagtacttatttgaaacagcaaaatgcaagcttaaaccagtctgtgaaaccaactacaactaagcttgagcaattaggtaaagagttagaagggcttcaacgtcaagcgcagactcaaggccaaaaaatgaaagaagatgagattaaaaaattacaatctcagtatcaatcgaaattaaatgagtttaattcaacacagcaaggcttacagtcaagagttcaaacgagcttacaaagtatgaatacaacttttgagactagagttaagcaagctgctgagcaattacgaaaagaaaataatcttgactttattttgaataaaaattcgactgttgcctatgacgctaagtatgatttaactgataaaatgatacaaaaggttaattcaatgaaataaattaatgaaagtgcaacaatatcgtttagatgaattagctcaccttgttaaaggtgagctaattggtgaaggtagtcttcaattttcaaacttggcgagtttggaaaatgcagaggttaaccatcttacttttgtgaatggtgagaaacatcttgatcaagctaaagtaagtcgtgcgggcgcttacattgttaccgcagctttaaaagaacatcttcctgaaaaagataattttattattgttgataatccctatcttgcgtttgcaatccttacccatgtatttgataaaaagattagctcaacaggcatagaaagcactgcccaaattcatccatctgctgttatttccaaaactgcttatattggtcactatgtggttattggtgagaattgtgtagttggcgataataccgtcattcagtcacataccaaacttgatgataatgtagaagttggaaaagactgttttattgattctcatgtcactattacaggtggttctaaattacgagatcgcgtccgtattcattcaagtactgtcattggtggagaaggttttggttttgctccatatcaaggaaagtggcatcgtattgctcaattaggttcagttttaattggaaatgatgtccgaattggatcgaattgtagtattgatagaggcgcacttgataatacaattttggaagatggggttattattgataaccttgtgcaaattgcacataacgtccatattggttcaaatactgctattgcagcgaagtgcggtattgccggaagtacaaaaattggcaaaaactgtattctagctggggcgtgtggagtggcaggacacctttcaattgctgataatgtgactttgactggaatgtcaatggtcacaaaaaatatttctgaagctggaacttactcttcgggaaccggattatttgaaaataatcattggaaaaaaacgattgtacgcttgcgacaattagcagatgtgccattgacccaaatcactaaacgacttgatcatatacaagctcaaatagagtctcttgaatcaacttttaatttgcgtaaatagaatattatgaccgagtctactacacctaaatttgccatccctgaattaccaatgcagattcaaacgattcgtcaatatttgccgcatcgttatccattcttattggttgatcgtgtgactgaagttactgacaatagtattgttggttataaaaatgtttctatcaatgaagagttcctacaagggcatttcccagaatatccaattatgcctggtgttctcattgttgaagcattagctcaagtttcaggcgttcttggttttattatgaacaatgaaacgccaaaaccaggttcattattcctgtttgctggtgcagaaagagttagatttaaaaaacaagtagttgcaggtgatcaacttgtattaaaatctgagttggtaatgcagaagcgcggtatctacaaatacaattgtacagctagcgttgacggcattgtagcagcaaccgctgagattatgatttcacaccaaaaaacagagcaggcatgagcaatcacgatttaatccattctaccgccattattgatccatctgcagtgattgcttcagatgttcaaataggaccttattgtattatcggtcctcaagtgactattggtgctggtactaaattacattctcatgtggttgtaggtggttttaccagaattggccaaaataacgaaatctttcaatttgcaagtgttggcgaagtttgccaagacctcaaatataaaggtgaagaaacgtggcttgaaattggtaacaataatctaattcgcgaacattgcagcttacatagaggtacggtgcaagataatgcattaaccaagataggtagtcataacctattaatggtaaatacacatattgcacatgattgtatcgtaggtgaccataatatctttgctaataatgtaggtgtcgctggacatgtacatattggtgatcacgttattgtgggtggtaattctggaattcatcaattctgtaagatcgactcttatagcatgattggtggggcttctttgatccttaaagatgttccagcctatgtgatggcgtctggtaaccctgcacatgcgtttggtataaatattgaaggtatgcgaagaaaaggttggtctaaaaatacaattcaaggcttaagagaagcttataaattgatatttaaatctggattaacttctgttcaagctattgaccaaattaaaagtgaaattttaccttcagttccggaagctcaactcttgattgattctcttgaacaatcagagcgtggaattgtgcgctaatcaagaagacataaaaaagacactgttttaacagtgtcttttttataactaaattatttgttaaagaattttgcttcttcagactttggatattggctaagtaacttgttcttgtattgatttgctgacacagtattcttatcaacatctttagcgatactataaagttggtacaatgctcgaggtgccttacttgaatttgggtattggttagctacgacattatagtttttctttgcttcattataatttactggatctgtcgctaaatgaaactcggctaaccaaaaataagcattacctgtatagatactattaggatggttttttataaagttttgcattggagcaattgcttttttagcaccgccttgtttatacgcatctaaagctacagtataagcagctttttctaattcgagggaatttgactggttttgcgcagcagctggtgctggttgagtagtggttgttggtgcgctaggctgctgctcagaagtttgtgtggctggtactgcagctactttattactctctgtggtttgaggggctggtgcactagcaggagtagtgttatcggatgttgcattcgaactatcatcttgtgtagcactgtcagggtcaactttttggtgtaataattctaaacgttgatctaagtcggtatatcggtttgctagatctttctttaattgctcaatatcattagcttgttcttcaagctgacctcttaatgtacgaatatcattttctaattgttggtttttttgcatgagttcccagtttaaatttgtaggaactgaaatattgcttgaagaagtattagatgcactaccatcattttgacttaaaccacgagactcgatagggatatttgcgtatagagaagtggtgctcattaaggcaataaataataaagaatgcttcttcatttgcatgtgtataaatccataattttatataaaagccaccttgacacaggaatataaaaaacaattctctaaatatctaaggtttttcattgatcaatgcaattaaagcagttaacagtttaaatgcaaggatagtttacaatcttcaagcatattttatgcaaaataagaaaagagcataagttcaagaaattacatttttggggtttaaagccatttttgctgaggaattaatcaatcgaaacaaaaacttgccgaaaaaggcagagaagggttgcaactcttttaaaaatctctatactttgttttgcaatggtagccccgctggtggcttcgcaattgtactctgtgaaccccgccaggaccggaaggtagcaacggtagcagatctatgatgtgccgaagttttgctagtggggttgccaccattctttcaatccaattttctttggattgcttttaaaattacatctaaatcaaatcctctatattgtaagaatctgatctgttttgctttaagttttggatctttctctacagcttctccaaattttttaactttaagttgataagcttgttctacccaatcaatttcttgaatttcatctgcaattaaatcattttcaatttgtttagtttttaaagcttgttgaatccgtttcggccccttacctttacgaatttggcttgctagcatttgctcagcaacacgctgatcactctggtaattttgttcagataactcctcaaccagttgttttacttcttctatattttgtgcataacgagctaatttctcgataagctctgctttagagtaatctcggcgagtgagtaaagcaaaagcatatgagcgtaaacgttggccagtaagaggagggcgctgctgagattgctcatcgtttcttttgaacatataaaattccttgtaaaaaacgccccgaagggcgttttatgactcatgtataattacgattctaataaaagatctggctcttcttcatcttcaatttgaactgcaccatttgtgcctgtagtcagcaattgttcacggatattacgttcaatttcttcagctatttgagtattttcttcaaaatagcgaattacattgtttttaccttggccaattttattgccttgatatgaataccatgcaccagctttttgtacgatatcctgttgtacagctaaatctacaagttcacctagttggttagtacctttaccgtatagaatttggaaaatagcttctttaaacggaggagccattttgttcttaacgactttaactttagtttctgaaccaacaatttcatcgccttcttttacttgaccgatacgacgaatatctaaacgaactgaagcgtagaatttaagagcattaccaccagtggtagtttctgggctaccaaacataacaccaattttcatacgaatctggttaatgaagataaccatacagtttgaacgtttagcattacccgtaattttacgaagtgcctggctcataagacgtgcttgtagacccatatgagagtcacccatctcaccttcgatttctgctttaggggtaagtgcagctaccgagtccacaacgattaaatcaattgcgcctgaacggacaagcatgtcagcaatttcaagtgcttgctcaccgttgtcgggttgtgaaacaagtaggttatcaatatctacaccaagtttgcgtgcatattgagggtctagggcgtgctcagcatcaatgaaggcacatgtaccaccagatttttgacattgagcaattgcttgcaatgtcattgtagttttaccagaagattcaggaccataaatttcgataatacggccttttggtaaaccaccaatccccaatgcgatgtctaaagttaaagaacctgtagatacggcttcaactgcttgaacagtgttatcaccaagacgcataaccgtatttttaccaaattgcttctcaatttggctcaaagcggcttgtaatgctttgcttttattctcatccatctcaaaaacctcaatactctatgttcatcacgtttaacccaagtggatgcattgaatctcaacttgtttcacagggctaatagtgacagattttttctctagcttctatatattgtatatgtgagtgcgacacaactcgacgtttttattcatcattataagaccagtgatcttcataatgttgatcattatcctgtttaaaccgattgatttgtcgccgatctttcttgcttggtctatggtcaggtcgtgctagattatgcaattttcgttgggaagcaatcaactcccgtcttgcaatacttacttctgtttcttcataaagttgttgtgcaacaggggccggtcctcgggtattggagagcgctttaacaacaactgtttttttatcgaaaccttgttgaacaacgagctccataccgacacgaatttctttagaaacttttacacgttcattattgtgatgtactttacccccttcaattgcagctttagcaatagaacgggttttaaaaaaacgtgctgcccacaaccatttgtcgacacgcatggtttctacagcatcgtcttcacgcaattttgacatcattatcctttctatcaatttgattcaaaatagacagtagctctgtaagctgatctagagctttatactctaaatcttgtggctgtcttatactcttaagacttgagggctgtaagatagtaaacaagtgtcttataccaaatttttctgcagtttttaaaacaggaagtgtgtcatctaaaaaaatagtgctttctggcgcaaaatgatgcaagcgttgcaactctttccagaattggatgtcttcttttgcgtaaccaatttgttcgctagatacgatgacttcaaaaaaatcttggataggaacgttatcaagttttaattttaggcttgcacagtcagcattggtgactagccaacattgataatcttgtgcttttaaagcgctgagcagctccatgcatcctgacctcgctttaattttatgctgaaattcttgctggagctttaaaacatccacaccagttgtttgtgtccagaagtttgatgagtaccaagcaagggtatgtttatggctgcgataaaactggtttaatatttcttgactctcagttaaagatagatgatgtgtttcagaatgtcttttaggtaagcattcgttccagataaagtcatcaaaagctaaatctagtaaagttccatccatgtcaaacagcactaccttattcatgttgcgaacgctccagctttaaatatacatggaagaaattagcttaggattataaacattaaagtctcaaaaacagattgatttgttgttatctcatcattttaaagttctaaagatattttacttttgatatattatttcaataattaatgataacgagtgaattaaaaaatgaaaaattctaatttctttgttgtttttatcggttctatttgttttacatttagtgcaaatacattggcacaaaatataactgcagttttttcacctaaaagaggtgtagtctgtgataaatatatttgtgcagataaaaagggagtttccaaatccttaactaatcaatatttaggtgcaaaaaaagcaaaacaagctttttcacaaggtgactttgatacatctgcttttactttttctaatggtgtattttgtgataccactactaaattgtgccatgtgaataaattttttgaaaatggtcatagaagtagagtagataaaaaaatgactgataaaatttttaaaaataggtagttgtatgagttgtaaattagttttttgatacttttttgcgtttctatactttatatgaaattatcattatttaaatattattaaaagttggaataaaagtgggattatatacaattagatatggttatcgtaacaacagtttttttattgcttcaaacacggctgggcagtttattgtgattgatgcattaggagcagatttccaaattggtcatcaaatttcttatgaagggagcaaaataataaacgaaacattaaatgatgaaacggatgcaaaagttcatcttgagagcaacgaaaaagaagcttatgagtatttacggacaatgaaataatcatctcgttattttgatttacataggatacgtattggcaaacattttataaattgaactctacttatttaaagttatattaaaaatcatttgaataacaatttagagtaggcgatgaaaattggatttattggaggagccaatgatggcatagtgatcaatgctgccaatggtattgatacttataaacttgaatggcattacaaggctgagaagcattgtgaagaacagccatcattagggctaaatggccctgaatatgactattacaatttattaattttgagaaaaaataaagaggcaaaactcttctacgttttaactaccatggacaaagaagatattgcggataagattaatgagtattgggagtattccacctctgtaggttatgactttgatgagtagtaaccattttaactcattgaaatattttatttatatcactatttaactgaattataactcaagcttaggatgatatatttcataaagaacatgcttttgtaaggcatgttcatctggaagcttgggatgattaaagtatttaactttgcgcattcctagtctttccatcacggcttgagatggcttattcactgttgctgtgaaagaaaccactttatctttattgagaatattaaaggcatactccaatgctgcttttgctccttcagtggcataaccttttttccagtgttctgtagcaattctccatccaatttcaatgcagggagaaaaatcaaattgttctggttggttgtgtaagccaataaagcctataaattcttgagtttcttttaattctaccgcccaaaatccccagccattttcatcaataagagctgatattctttgaattaaacttatactttcagtagcaggtaaaagctttgggaaaaaacgcataacatcttcgtctaaacccattttgataaatggctctgaatcagactctttccattgtcttaagattaaacgttcagtttcgatcatagtaaaaattctttaacgagagtttttaattttagctaaatattctacagcggcttttgtataattttctgtaagataatttttgagttaatgcttaccacacctttaattttattgagtgtattaataacaaaatgagaaaaagagtttagatctttagtggcaacgtgcagtacataattagattcacctgtaatgatataggcattgatgacttcatcaaaattcttgatttggcttaaaaaaaagttgtggtcattttcggtgagttgagcaagttttatttcaactatcgcctcaatttttatacctaatttttcataattaactttcgcttgatatttttcaatgattccgttggtttctaaaattttgacgcgtctgtgacaagcagatgctgaaagattaacaagatcagcaagttcttggttacttaaacgggcattgtcttgtaaatacttcaaaatttttagatcaattgcatctacattcattttcgaatttcatccatattttttaattttaattagaattttatacgaaaatagctatttttgatcaaatattatcgaataaatcgtacaaattgacgtgataaaattcaaatacaaaggaaatgtagaaataggtgcaataccaaatgattactcgtgaacagtgtttgtattgggatcaggaagatgaactcaaaaaatttaaagatgaatttgcattgccagaaggcgttatttatttagatggtaactctttaggtgctagaccaaagaaatctttggctgtcgctcagcatattatttcccaagaatggggagaagatctgatcaatagctggaataaggcagattggtgggggctaccaacgcggctgggtgacaaagtcgctaaactgattggtgcggaacaaggtgaagttgttatttcagattcaactacactgaacttatttaaagttttatctgcagcggtaaaaattcaggctgataaattccctgaacacaaaattattgtggcagaaaaagatgcttttccaacagatatttacattattgaaggtttcattgacttaattcaaaagggctatcaggttgaattaattgatggcgtagaagacttatctcgtgctttagagaaagatgttgctgtagtagtactttcccatgtgaattaccgcactggttatttttatgatatggcaactattaatgaacaaattcactctaaagatgctttggtgatttgggatttatgccactcagtcggtgcggttcctatgcaccttaatcaaactgatagtgattttgcgattggttgtacctataaatatttaaatggtggccctggttctcctgcattgctctgggtcaatgaaaagcatcgtgatcagttctggcagcctttatctggttggtggagtcataaaaaaccatttgatatggcacagcattatgagccagcgaatagtatccgccgatatttatgtgggactcagccggttatttctatgagtctgattgaatgcggagtagatattttcctgcatgccgatatgcaaaaaatccgtgagaaatcgttgaaattaacagatttatttattcaattggtacatcaagaatgttctgaattcggatttgagttaattacgcctttagatcataaccatcgtggtagtcatgttagttatcgtcatgaattcggttatgaaattattcaggcacttattgcacgcggtgtgattggtgattatcgggaacctgcagtcttgagatttggtattacacctttgtatctgggctttgaagatatttggaatgcagtacagcacttaaaagaaaccatgctgaatagtgaatggaaaaacaaacagtatttagttcgtggtgaagtgacctgattttaaggaatcaaaataaaacaaatggctaggagggcctatgagtagttttgatgaaatacaaaatagagaagctgggctgcataaaaagttatctgcaaaacagatggggatgattgcgattggtggagcaattggaaccggattgtttatgggaagtaaatttgcaattagttttgcaggtcccgcagtcatcgtcagctatgcgattggtggtttaattgcttttgcacttatggcttgtttggctgaaatgacagttcagcatcctacttcaggttcatttggtgcatatgcagaacattatataagtccacttgctggcttcttggttcgctactgttactgggcttgtattgtgctggctgtaggtacagagattaccgccgttgctgattatatgaagctctggttcccgaatgtaggctcttgggtctggattggatttttttcactgaccttacttgttgtaaatgcctatagtgttaaagcttttggactagtggaatactggttttccacaattaaagtttttgccattattgtgtttattcttttgtctattggtatcttgacgcaaagcaatcagggaatgacgcaagttgtaactcatttatcaggacatgggggcttttttccaaatggttttagtggggtatggattggtgtcattatttcaatatttagttatttaagtatagaaatgattgctgtcgcggctggcgaagctaaagacccggaaaaggcagttaaaaaagcattcaaaagcacagcacttcgactcattttgttttatttattgtccttattcctaatcgttactttggtgccgtggactgttttgattggagcagatgcaacaagcccttttgttatggtcatgaagattgtcggtatcccgtatgcggatagcattttaaactttattgtaattgtagctgccttatcagccatgaatagcatgctttatatttcaactcgtatgctgtttagcttgtcacgtgcaggtgatgccccaaaagtctttggtcgaattagtagtaatggtgtaccggtaaatgcgctgttgttatctgcggtagggattggtattgctagtattgtttatacgattaatccagcttccgcatttccaattatgattgcgctatccatgtttggtgcgttgttcacgtggggaagtatatttgtgactcatatgttttttagaagacatatggttcagcaaaatatacaactaaaatttaaaattcctgctagtcgatttatctctttgtttgggtttattgcgattttaagcattacagtgactacctggtttaccagtgaatttaagtctactttacaatttggcgtacctttagtgcttgttcttatatttttctattatttgaaacgttctaccgtaaagttaaatctcaactctagtgaagaaacattgaagtgactggtatatgagaaagtatgacaatgctacaacggtagagaatgaaggtgaaatactagcaggcttccaatacagaagcttgctgagttatcaggcttattatcatataaaagatataaagtatggttcgaagaaccgatcaactctggatttttttcctctagaacatgtcagtaaaaccgtaatttttatacatgggggatattggcagtggtgtgataaatcggactttgcctttatagcgccgtacatattagcaaaaggagcgcagtgtgtacttttagaatatgacttggctcctcaaagtcatatttcacaaatcgttgctcaaactcaacaagcgctcgattttatcgctaaacaaaattggaaaataggcgaagtagtagtggtcggccattcagcaggtgctcatcttggtgctttatgtttaaaccatccgttattatccaaggcaactttattaagtgggatttatgatttattacctatacaagagactcatttaaatcacgctttaaacttatcgcaagaggatattttgaaatatagtcctattcatcagcaggaacagatcaatattccttgtacgattttgtgtggtgggttagaacttagtgaattaaaatggcaaagtcaaaattattttgagtaccgacttagtcaaggtgaggatatgatttcttttgaaattattcctgagattaaccattactctattttagagcactattttaaatttatatttaagtgagaaattaagtttgagttagccttggtaaacatagggtaagttgatttaaatattatagaaacaataggtggggggaaaatcatgaaaagctatcttatttataatattaagttcagctaataaaatatttcagtacaagagcaatcagtatgataaataaccaagttgaacaacatataaatttatatattgttttattaaatttaaataaatatattgatttttgcttaatcaacaaggaaatgtagagtgcgtcacacttctttgagttttttattgctgtatactattttaagttgacctaaactaatatctcgattagattaaaaagatagtgttttctctctaatcgacaaactgtttagctgttgcttagatgagtttatagtccgtagcttcccaagatgcggacttttttatttttgtacaattcgttaatggtacaaagattcgcgcattaaaaagacagttaatagtaaattcggttcaattcaagtgaaaaacttaaagaagtattgtaaatatatctttaaaggtatatatttatatatgcatatactgcgtctgtaaagttgtttgttttttaatacccacatatttttaagatatgtgggtattttttattaaaaatgtttatttaaaaaatatttttaaactggctaagttttatataaggggtttattttagttagataagaaaattcaaataatttgttttgcataatttatttctaataagttaattaataaaaaataggaaatatatatttatacatttattgtacatattaatcacagttaaagaaattgttaattttttatagttgtatgaacttttatattttgaaataattgtctataacctgttaattatcatattgttatggatattttgaagtttctaagaagttttaatactgttggtacttacttagcaatggctactatagttcttatcataatggttattttcttttatattattgaacccaaatagagtgatattttaattataaaaaaataaaatatttaaattataagtagatggatgtcacatttttctataaaaaagtggattgatattgtttaacctaaaaaattatgaaaatatggttggggtttaaaagcagataaaactcctcaaagttctcatctaaaattttaatcctgaagtaaaaagttattaattatcataaaaatacctgaaatataatatatggagatagtcatgaatattcgccaagtgtctgctatttgtctttcaatagcagctactcattttgtgtatgccgcttcaaatgttgcaaatcctgtaaatgattcttcccaaacaaaaggaattattaaaaatcaatatattgttatattaaataaggatgcaggtccttctaaagatttcgcacaaaatattgctaaacaacatgctggtaaagttttacaaagctacgatactgttcttaaaggttttgcaatttatttacctgatacagcagggacagcctttattgaagcgatgaaaaagaaccctcaagttctttcagtagaaagcgatacaatagtaaatattgatgcaactactcaaagtaatccagattggggactagatcgtatagaccagaaagctttaccattaaattcggcttattcttatttacagacgggttcaggtactacggcttatatcgtggatactggtatattgtctagtcaccaagagttttcaggacgtgtgttaagcggttataccgcaatatctgatggcaatggtacaaccgactgtaatggacatgggacccatgttgctggaacagtaggtggtacgacctatggtgttgctaaaaatgtcaatttagttcctatccggattttggggtgtgatgggtcaggggcctcaagtaatgttattgctggtttagactggatattaaaaaatggtaaaaaacctgcagttgtaaatatgtctttaggtggggcaacaagttcttctttagatagtgcagtggaaaatttatataataatggttatgtcatggtcgtagccgctggcaattcaaatacagatgcatgtacatcttctccagcaagagtaagtaaggccattacagtggctgcgacagataataccgatactcgggcaagctattctaattatggaagctgtgttgatatttttgcaccgggtagccaaattaattcttcttggattggaagtaatacagctaccaagatattaaatggtacttcaatggcaactccgcatgttgctggtgtagttgctgaaatgcttcaaagtacacctacggcttcacctcaaacgatctctaccaatcttttaaatcaagcgagcagtaacgtagtaaaaaacccttcaggtagcccaaaccgcttgttatataaatctccttaataaaaatataattctctatgattgaaaaggtcccgaaggacctttttttaaatttttgcatgtgtaccatacttgtcaatcatgattgaactggcttcatttaaaccacgtacagtaacttgtatgccattcttttggaacttttctactgctgaatcaagcattgcaaccgaagtgacatcccaaatatgtgaatgagtcagatcaataatgacttcttttacttcctctttaaagttaaagctttgcatgaatctatctgaagaactaaaaaagatttgtcctcttaaatcatataaacgagcgttgccttctaatgaacttattacctgtatatcattttcaagtttattggctaagaaaagtgcggaaagtagtacacccgtcaatacgcctaatgctagattgtgagtagctacaactacaacaaccgttgcaatcataacggtattgctacttttaggattagttttaaattgggtaagcgaacgccactcaaaagtacttattgataccataatcatgacagcaacaagcgcagccataggaataactttcaaccaatcacttaaaaatactactaaaatcagcaagaatatgcctgcgcataaagtagataagcgtgtgcgaccacctgatttaacattaatcattgattgcccaatcatggcacatccagccatcccacccataaaaccagaggcaatattggcaataccttgacctttacattccttaaatttattactcgggctatccgtcatttcatcaacaattgtggctgtcatcatcgactcaagtaagccaactgcagctaacgccaatgaataaggaagaatgataagaagtgtatctaaattaagaggaatatctggaattaaaaaaataggtagagtatttggtaatgctcccatatcgccaactgttcgcacatcaaggcctaaaaagaaggcaagtaatgtgattataacaatacatataaggggagatggaaaaatttttccaagctttggtacataagggaatagataaataattgctaaaccaatagcgactaatagatagacgtaccaacttacattgactagttctggaagctgggccataaaaatgagtatggcgagagcatttacaaaaccaatcacaaccgatttagagacaaagcgcatgagcttagcaagcttaagataccctactataatttgtatgacacccgtcaaaatagtagctgcgaataaatactgaagaccatgttctttcactagggttgtcatgactaaggccatagcacccgttgctgccgaaatcatggcaggacggccacctacaaaagaaataataaccgcaatacaaaaagacgcatataaaccgatttggggatctacacctgcaataattgaaaaggcaatcgcctctggaattaaagccagaccaacaacaagcccagaaagaatatctgcacggacattagagaaccattgttctcgaagattcgttaacatggaaatagcctagaattttaaattttagaaaggctagtgatgtgatataccaacacacaagcgactacaccacatcactagacagtgatgagttatttacaaaggagaagggtaaataaacttaaggtggcgtaagtgtcatggataatgaaaatttgaagttttaaagaggtgcgaaggataacataagtttttagggggagccatttaagcttgctactttcacttattaggcatctaactattttttgatttgttcatttctgctttaggcagagacgtaaattcatttaatggcatatctaagaaaaagtcaggagcgtcagtgtgtttgcaatttaaccaatcgtttctaagatggtcaggtattacaataattgaacgtttttcatcgtcaggtttatgaaactgcttcataaacgaatgtcgatctgcattgattgttaacagcgacattgttctaactttctgctcatcaattatggtttcttcataaattgctgcaagcgtaaatggcttcccatcttgacgaaagatgccataccaatgtgctttaccattgatatatttcggttcataaatagcttcaacaggaactaggccaaattgatcatttgaccaggcatgtttaaatgaacgtttgtgatcaaccgtttcagttcttgcattataagttgcatatttaaatgaaacttctttcgcatatggtggcaacattccaaatttaacttttcgccattcccattcattttgatgagataagattattgggcaatcatcacttggatagacatctgatttgtaatcaaaggtgggttcaagtaagtctaattgataagaatgctctttcttaaggggtttaaaatttgcacacataacgaaattcgatttgtaaggatccttaacctttagcttggatcttttaactatgtggtatgtatatttttatagattgaattgtctatttgagtattaaattttacttttcaattactttgttaaagctttctttcaaattatttatcttaaaaatgagatcaatgatttataaggcaacttataagatattcatttgttttgaatagctacttttatgcaacagagccttgcagaaatttggattttaataaatgagctaatcatcataatacaaaagatatagagaacgtatacaaaccaatattttcagcggtttaagtaactctttagaaaactttataaggtggaactatgaataaacatttattagcaaaaatcactcttttaggtgctgcacaactatttacgtttcatacggcatttgcagatatacctctgacacctgctcagttcgcaaaagcgaaaacagaaaattttgataaaaaagtgattctgtccaatttaaataaaccacatgctttgttatgggggccagataatcaaatttggttaaccgaacgtgcaactggcaaaattttaagagtaaatcctgaatctggtagcgcgaaaacagtatttcaggttcctgaaattgtgagtgatgctgatgggcaaaatggtttgttaggctttgcttttcatcctgactttaaacataacccttatatctatatttcaggcacttttaaaaatccaaaatctacagataaagagttacctaatcagacgattattcgtagatatacctataacaaaactacagatacatttgaaaagcctattgatttgattgcaggtttaccgtcatcaaaagaccatcagtctggtcgtcttgtcattggtccagaccaaaaaatctactatacgattggtgaccaaggccgtaatcagttagcttatctgttcttaccaaatcaggcacagcatactccgactcagcaagagctcaatagtaaagactaccatacatatatgggtaaagtattacgcttaaatctggacggaagtattcctaaagacaacccaagctttaacggggtagtgagtcatatctacactttagggcatcgtaatccacaaggtttagcttttgctccaaatggaaagcttttacaatctgagcaagggccaaattctgatgatgaaattaaccttgtattaaaaggtggtaactatggctggccaaatgtagctggttataaagatgacagtggttatgcctatgcaaactattcggcagcaaccaataaatcacaaattaaagatttagctcaaaacgggataaaagtagcaacaggtgttcctgtgactaaagagtctgaatggactggtaaaaactttgtgccgcctttgaaaactttatatacggtacaagatacctataactataatgaccctacttgtggtgagatggcatatatttgctggccaacggttgctccgtcatcggcatatgtatatacgggaggcaaaaaagcgattccagggtgggaaaatacattattggtcccatctttaaaacgtggggtgattttccgtattaaattggatccgacatatagcacgactttggatgatgctatcccaatgtttaaaagcaataaccgttatcgtgatgtcatcgctagtccagaaggtaataccttatatgtgctgactgatacagcggggaatgtgcaaaaagatgatggttcagtcactcataatttagagaatcccggttctctcattaaatttacatataacggtaagtaacttatttcaaaaaacccagctatatagctgggttttttatataaaggtttatatttattcagttacgaccaatactggcacatgaatttctcctaacagtgcttgagttacacttcctaagaagaactttttaaaaccttttcgcccatgagaaccaatcactaataaatcagcttttagctcagttgctgctttgatgatttctgtatgaattgtttgaccttcaacaattttggtttcaacagaaattccatgttggctaaattgttctttagcttgatctaaaatgctctgaatcgaagctctcgctttattaaaataatcttgcgcaatttctgtactatcaataatttcaactgaaataaatggatcaatagtgagtgcatataccaaagtaactttactactaaaggctttagcaagacttgcagcatgattaaccgcaataagtgaagtaggagaaccatcgaccggaactaaaatatggtgataactcatatattgctccttattgtcttgtgacaatatttattgttgaagaacctaaacttgttatcgttatggttatattatcgccaattttataatttttattgtttgtttttagtgtgtaaggtaaatgactaattcatagaatagtgactttctagataagcctgaccctgtttaagaatagagatcacctgattagcatcaatagctgattcaaataaaaaaccttgccctatgttgtatccaaattgaagaagtaattcttcttgttctggtgtttcaataccttctgcaattaatccgagtgagagatttggagcaagtaagccaattgcctgaacaattgcataaatggatggatcatgttgcatcttttgtataaagctacaatcaacttttaagcaatcaataggatagtctcttatatgtgttaaagaagagaaacctgttccgaagtcatctaaagcaatgcgtactccatgctgttttagtttattgagtgcgcgaatcacatattcagaaccacggtcacccagcatatgttcagtaacttctatctcaattaaatgggtaggaatttcaagttgattaatcttttttaataaacgttcagcataattatctcttaagaactcaactggtgcggcatttagagaaacaggaagcggcacaaaacctaattttatccatttagcaatatcatgcaaaacttgttgttgcatgatttcaccaattttactggctaaatcgtagtctttaaaagcttcagcaatctgagaaggcaaacctctttgggccgaagtcgtatgccagcggagtaatgcttcaaagcccactacagcatgagtttttagatcgactttgggttgatagtagggctgaatggtatgatgacgaataagctggcgagcaatgttgagttgagaggcgattgcctcggttaactgcatcatacttgggttatacatacgtatgccgccacgaccacgggcttttaagtcatgtaatgccatatcggcacaacttaataagctcgattgatcaactgcatcttgagggtaaatggcgcagccgatgctcatgccgccgttgagcacattcccagcatatgtaatgggttgattgagttgttgaagcaatacttcagcaagttcacgaacatcattctcattttccaaatggctaacaataactgcaaactcatcaccacctaatctggcaactgaacatctttcagggtctacgcactgattaaaacgtttagaaagtatttttaataagtggtcaccagcactatgacctatagtgtcattaatatgcttgaaatgatctagatcaattaaaagtagccctacactggtttgggtttctcttgagtaagctagggtgcgttttagttgtagcttaaatgaacgtctattaaataaacctgtgagttcatctctctcgctaatatctcttaatcggttttcagtaagatactgttgagtgacatttcgcgaaacacacaatatctgaataatttcgccgtttgtatgttgaattggggtaagcatgttatcccaatattctggatcttgatttggtaagcaactcatgccagcgaatcgggccactttaccctgtaaggctttttttaaggcaattcttccgcgtttacgaatatgggggggtaaaagatctaaccatcgcataccgaattttttttcatctacaggtatacctaatgcaaggcatcctgatttattcatatgagatacagtgccatctgtatttaaaaccttaatacaatcgacactgatatcgagcatttgattttgtatatcgatatcttttcgtaagctttgctgctcttgtatatcttggtcaatatctagaaaactaataaaccattcattttcttgagaagattcatggtatttcgacaattgaatagaaattttacaccatcgataataatgggttttatgcaaaagacggcatttaaattcaattcttgatcggaaccgtatcgcatctaaccatttgtttttaacttcttctaaatcggcagggtacacgaaatctagccattgttgaaacaatggaggagaagtatcgcgccagtattttgtacactccgtattgcagtataaaattaagcctttttcatcactgacccaagtcggtaaaggaaactgctcaacaataaagtgcttttgggtagtgttcgacattgaagtcataacatgcctaaaactgctgaagagttaaactatttataaactgtattgtaatagttgtgtcgtcaccacaaaagctataaaaaattaatatttgatgtttttttcgtctcgagtaaaggtttcttttaaataaaaattttattaatcatctatgcatatgttatttattaacttttaatctcctaaagattatgaaatgtagaattttaacttgaaaaaattatgcgtatttttgtaaaaaacatgttaaaacagttgtttataagattcaaatagggttttttataaaaaactcatacatcaaaaacattttaaatcgtgaagagttaattaatttaaatatttatgagaaaaaatttaaaaagaaaaaagcatttaagttattagaggttaatacaataaatactattaactttacaaaagtaatataaaataaggtcttatattatcgtaaaattcttttcatcaaaaaggatatataattcctttttgtgcattttatagcctacattttccccaagatgtaggttttttttatgtaaaaattttattattttaattttatttaacttattaaattataaataaaaaaagccatggaggctttttatacggtttccggctttttcaactgttgttgaatgtagaggttcatataatactgctctatataatcgtcagcataattgttagctaatgtcttagtagctacctgttcatgcttgctgtaacagttagtttctaaatctttttcaagtacccaccattgacggttaatacgacgtacttgaaacttatcactcttatattttcttttagccattttttcctaaaattacgttagagatattaagagagagtttctactggagttgaaggaacaagtcaacaagcatagtgtttaattgattactttatgaagtctatattcctgtaaacattagagaaaataataaaaaagctctcatgagagagcttgagaattaatcgttttaaaatgttgaaaacaacaattatcgagaaagattttttaaaagcaattttaagctttccatcattttttctagttgaagaggggtgataccttcgaatgattgttcaagtactacactcgttagatcattaattttattaatcatttctgtaccacgttcggtaagatatacacgtgtaatacgaccatctgattgacaagaataggtttcaactaagccttcatcttttaagcgataaacaattttagtggtagtcgacatttttgaaataatcatatcagatagttctgatacgctagcgtgaggtttactacttagcgcaagcataatacgtcgacgtgaattatctaggccatattttttgagggcattatcaatattttgaacatattgagcatggacctgagtaatccaataatatggaaaatcttcaagagtgaaagattctgttgtaggtaaaaaacgcgcatacttctttgtcattgacttttccccataccttggtggatcgcattttatgaaacttattttaatagtggaaaaatatagtttcactaagcaagttatatcaggactttaagtcatgagcaaaatttatattgtttgattaacaaggacaaactataaattttcctcttctaataaaacttattccttaccgtttatttgaacttggctactcgcttggtcgtaaaatgaacgatatttgttagcatgagaatcgtagaaaaaaaaactcgttttgaacgtgacatttctatcaaaattttttgtctacaaagtcataacttaaaaaaataaatccattcaataggtaaatatttaaattaatcatatgtttaattgattttttgaagatgaaaatttaccatacatttaacatgattgatcaaatattaaagaaaattaactaataaatggatttatattattgaatttactaaatttttaaatattaattttactgttcaaaagaatcatgatttacgaatgtattttaattaaggaattgtttaattgttgatcttttgaattgtatgttaattgttattttttatttattttaatgtagtgcattttcaaataacgatagataaattcttctggattaatgatgaaaaaattactaattacttctatggtagctttaacgatagggttaaatggctgtgcaagcatcattacaggttcttcacaaacacttacttttacaagtgtgcctgagtcagcaactattgagattaaaaatcgtaatggggtaaaagtccatacggggcaaacacctgctaccgttagcttaaaaaaggtgccggttatttcaaaccagaaagttatcaagtatctttcagtaaacctggttatcaaactaaaacggtagaagttacaggtactcttagtggctggtatttaggtaatattatttttggcggtttaattgggcttttaattgtggatccagctactggagcaatgtataagttggcaccaaaagatataaatacagtattagaagctcaaaatttagtaggagaagctaagcaaaagcccacgctaacagtgatgctggctcaagatattcctgagcaaatgatggcccgtgcagtacaaattaataaataaaaaatagtaataaaaaagggagaatttatattctccctttttaaattatgagtttgttaataatttttcttcttgattctttttaatgatggcataacttactcccgttacgatacttccagccgcaattgctgcaagatacaaccacgcatgattgattgcatttggaatcagtaatacaaatacaccgccgtgtggagtcacaagctcacagtgaaataaagcaactaatgcaccagttactgtgccacctagaatacaggttggaataacgcgcattggatcttttgctgcaaatggaattgcaccttctgaaataaagcataaaccaagcacaaatgcagctttacctgcatctttttcaccagtactaaatttatttctagcgaggaaagttgcaattgccatcccaattgcaggaaccataccgcctgccatcgtggctgccattggcatataggtattggtagtaagtagtccgactgtaaaagcataagcagctttattgattggtccgcccaaatcaatacacatcatacttgccagaataattcccattaatacagcatttgttgtgcccatattgttgaggaaatctttcattaactcaaaaatatgcgctacaggttgacctaccacatagaacataatcagcccaacagataatgttcctaataatggaataatcaaaatgggcttaagagactctaaactagttgggagcttaacttttttagctataaataacgcgatataacctgcaaggaaaccagaaacaataccgcctaaaaaacctgcttgtaactgtgctgccaataatcccccgattaaacctggtgcaagaccagggcgatctgcaatcgaatatgcaatataacccgacagcatgggtaccatgagggtaaatgctgctgcgccaatctgttttaatatggctggcagactaccagcttgttccgctgcatttaggccaaaacataaagaaagtgcaattagcaagccacccgcaacaaccataggcagcatataagaaacaccagttaataagtgtttatatacaccaactttttcagttttatccttattttcagttgttgcttgctgtttaccttgttctaaaacctgagcattagcaattgcctcagcaaaagccttgtcggtttgttttaaagcaaaaccagtgctacatctatagacacgcttacctataaagcggtcagtgttgacttcaatgtcagtagcaagaataacaatatcggcatcagcaatcgcttgaggtgataaaatattcttcgcacctacagaaccttgagtttctacatcgatttgatacccaagtctttctgcaccttgttgtaacgcttcagctgccataaatgtatgggcaactccagttgggcaagcagtaatggcaacaaaatgagttgcggtatttgaagcttgcttaggtttttgttcccactcatttgctggttttgagtgttcaagtgccgttaaaagtgctttgtctgcatcatctttaatatcttcaatagaaactaaagataaagcgttttgaccaaaaatatttagatttttaggttgctgtccaataataatgacatgatcaaaatgatcgcttgattcaaactcatcgagtgaaatgacactatgtttataaccgtgttgggttgcgactaaagcaagtttacgagccaagattaaagcattgacttgctgttgcggaccattagtgacaaataataaatgtttagcagtttgcatcagattcactcaatgaattgataatagtttgtgcttttaattggtttagaacctcagaagtagggattcgaaaaccaatttgtgttacagcatggcttgcaatggctgtcgcagtttttaaggtctcttcaggaggcagttggttaacaagcccatggatcatgccggctaagagtgaatcaccagcgcctactgtactttttacgataacttttggtgcttgagcatgtaaggggtgagtggcgtgtaaccaatttacgccatcttcacccattgagataaccacatgctcaatattggttaagctatcaaaaagttctctttgttcagcatagcttgttgctggacgttgataactttcaaccaactcatcggtattcggtttgatcatccaaggttgacattcaattgcagcaaccaatgctttaccactggtatctagggcaactttcttattattttttttgatcagttgaataagttgttgtaactcatcaatactaaaaccttgcgggaggctaccagctattgcaacaacctcgacttgtggtaacagagcttcaatcttattaaatagcctttgtttgtctgtttcagaaacaaaaaaacctttgccatttaaatctgtcatccgcccagaatgctcagcaatttttatattttgacgtgtttcaccatcaatataaataaactcaggttgaaattgagcttgtgcaaaatgtgtatcgaaaatttgtcgattatgctcacctaaaaagccggttacgattacatcatgacctaagtcttttaatacttgagcaacattaaggcctttgccagccgcatgaatttctaccgactcttgtcgattcacttctcctactagtaactcatccagttgaatggttacatcaattgcagggtttaaagtaattgttaaaattttagccattactattcccaatcttataagtcttgttcagatagctggcgcacagcaggggcgctatcgcatagtaaagcttgttgcgcaagcttttgagcatggctatagcttagtgtgcggatttgagcttttactaaaggaatgctatttggggacatactcagttcgtctacgcctaatcccatgagaatagggacagctttcgggtctgctgcaagctcaccacagattcctacccatttgccatgtttgtgggcagctttcactgtttgatcaatcaaattaagaatacttggatgtaatccgtctgcttccgctgagagtattgggtggcctcggtcaatcgctaacgtatattgggtcaggtcatttgtgccgatactgaaaaagtcgacttcttgtgcaagaaccggtgcaagtaaagcagcagacggaacctcaatcataatgccaacttgtaaattgccacatggatgttgggctcttacttcgtcaagaattgctttggcagcacgccattcttcaacgcgtccaatcatagggaacataattcgtaacggacgattatcagatgcttttagtagagcggttaattgctgttttaaaagttcagggcgtcttaaagttaaacggattcctcttaaacctaagaatgggttttcttcttcagcaattggtaagtaaggtaaaggtttatcaccacctacgtctaatgtacgtaccacaagcgggcgacctgcaagtgcatctaatacaactcggtaatcagcttcttgaacagcctcattaggtgcactgctatgagacataaaaacaagttcggttctaagtaggccaattgcttcagcaccacattctactgcttgtgctgtcgcttgaactttacccaaattggctgcaatttcgatttggtgttgatctaaggtaattgctggctcgtggctatgacgttcagcttcttcacgaatttgacgctgttgctcacgctcttgcttggcttgttcgatttgtgcaacatctggatctaaaacaaaagttcccgtatcaccattaataagtaaagtgcttttcggatcaatttctaggacttgttcaccagcaccaacaatagcgggaatgcctaaagcacgtgcgacaattgcactatgcgcacttgcaccacctatagcagttagaatacctgcgacacggtctttgttgagacgagcgacatcacttggcccaacgtcatgcatgattagaatataaggctctttaggctcttcaataaccacttcaccacataattgggttaaaactctgtcgccaatgtcacgtaggtctgttgcgcgttcagcgagtaaacgatctggtagagcttcctgtgctttagctgcagcttcaatatgttcatgccacgcagctggtgctgataaattttgataaattttttgatatacaccattaattaaatcaggatcatcaagcatttctaggtgagctcgaaagatttgtttaatttcagaggcatcagctttggctatgacttggtgaatattgttttttactgcatgtagggcaatatctaaattttctttctcgacttttacgcctgaacccatacgttcatattgataaacctttggtttaatcacatggacaggtccaaaagctaagccacttgatgctgcaatgcccgtattgttacccaatgtcgtagcatttgatattaccgtttgagcagggagctggtcaggtgtttcactggttacaggtagcgcttcaacttcttcacctaagccttgctgcactgccaaaataacttgatctaaagcctctacggcatcggtttctggctcagcgataaaacgtagagtttggccacgcttacaacctaacgctaaaagacgagttaaacttttggcagaaacaaagctaccatcgtctactgcaacttggatgtcgccttgaaaggtttttgtaagattgacaaggtgtgtagctggtcgggcatgtaagccgtgtgcatttgccagtactactgaacgttgaggccagtcaggaacaacgtcagctccaataatttttgcaatttcgtttggtgtttgagttttatctagctcggcaacttgctcagggttaaataaaatatcaattaaacgattaaatctttcattatcgagttggtcattggctgctatacaaacgagggtgttcagctttttaccatttagctctaatgcctgtgatggtttagtaatgctaatagctggttgctgaacaaagtgatcgctagaaatggaccagatttgatcttgcagttgaatggcttgttctggatcaagtgaacttagaaaaccacattttacaaaattatgttttttgagtgtttgagaagctgcccaaaataaatcttcgatatcttgtgcatcgatttcggtttgaataagattttcatgaagcgctaaagataatggctgagcttgtagtaattcgataatctgctcaggtttagaagcattttttacttgttcgctgacgtcatgcattaatgcacgagtaagaatttgcaaaacttgcaaatgttcatcagattttgctgcaatcactacagctaaataaattttattttctccatcccagatcacgccttcggggaaatgggctaagcggatacctgtttttaaaatatattcacgtgattgaggagtaccgtgaggaatggcaatgccttggcctaaataagtcgcgctttgttgttcacgattgatgagtcccgttatatattcaggcgtaactaacccatctttttctaatatatctactagacactttaatgcatgtgttttatcaacagcatgttgattcatatgaatatgttgaggctctagtgctagcataattatccttgaacaatttctttggctttagctaaaacagaaaaaaagaagctgtttgcattaaacaagtaaatatacctgttttttgacaacagcttcagatgaattaccttagcagaactttaacggtatatcgacgcatttaagtaaaaagctgctcgtttttaatacaaaaaaacctctaagccggattactgacttagaggcgaaaataaaagcagtgattaatgtttaatttcttgttctaaaatagaccaaagtttttgatgtgattttttaaataacagcatatggccaattgatttatagcctaaatcttttgggctaagttcaatcatttttttattcgcatttggatataaacttaataattcttgtacgttacgtttggttgcaatctcatcatcatcagcccaaatagcagtaattggacattgaatatctgaatgaaaatcatgaaaaatcgtcttacctatggcattttttacatatccgggacggctataaaactctcgccattgttgagcaacttttttaggtaggttttctcccataccaatgaattgagttgctccataacctttaacaatactagaaatagggaagataagattaaacataactggcgctaaaaccttggtttttcctttaaggcctttaatatgtccagttgaacctgcaaccgttatcacttttgcgactttattatagttaggtacgactcctagtagttgtccgccagcactatgtccaataagaataacttgatttgctttcgtttttattaataaagcatcaattgcagcaggaatatcaagtgttccccagtcggtaatacttgcggtactttgttttaaggctccatgtagggactcgccaataccacggaagtcaaaactcaatacatcatagccttgttggcttaaccatgttgcgaaagagtgataaaagtttttagttatacctgttgctgggcaaatcaggatagggtactcagctttcttttcttgagcaggataaaattgagctgcaagctgataaccatctttacaggttatccaaaaagattcaaaagtcttatccatagatttaaagttaattggctaatcatttatcttaatgtacatgagttctgaaaaggtacttgattaaaatgtgactataaagtcaagatttatgttatatagctcatcaaatcttgataaaacgaataatggaaattatggatttatcgaaagctgtacagctggctattgtctttagtggcgtctttttatggataggaatgttaactggagtatggaaatattggcaaatacgccgttccgaattaagccgtgcacattattatgtagatattgcacatagaagcagtttgctttatgcagcagccacacttattctggctgtattgagctatttcacgattttaaatgaagatattgctttatggtgtgtattggcaaatatactgttttttagtttctcaattttagtttatatcatccacggatttttgcaggatacgaccaatcagtttaaacaacctcataggttagggcatttcagtttacctgcatggttgatgacatttatgatgttcgctttaattattactgagctgttagcaactgctattttagtgatggggacaattttattgtttttaagcaaataaaaatggatgatcgctcatccatttttagaattcttatttctgttgactaagtcgtcttttagctaattttcgcattttgtggtcgacaaaggcccatacacaaaatacaaaagaaacaaccatggcatacataaagtattcgggtttcagattccctttaatcataccttgaaacagtaaagtcagcataagagcaagcgtcgttactccataaacaactgaatctttgctgttcagagtgttaatgaagacttgtttgttgaaatgtaatgataacatctccatccctccttgtggttgcgctaaaaccgaatgttttagtcaagaataagtttaatgttgtacttgtatttttagcttaattcaatagtcaatagaaaattttttgaacagttttataaaaacttctatgtttataaatggttaaggtattaaaaaagtaaatattaaacatttttgtataaaataattacttttttagaaaagagaaattatttaaatgaaatgtgtaataatttctctgttctttaaatttgctttagctactttgtttttttaaaaaaacatcaatagcgtgttgagcaatttcagcatcttcaaaagattgaacacctgaaacaccaatcgcacctaaaatctggccttcataaataatcgcttttccgccttctagcatacctttagcacttggcatactcaagaaaccaagacgaccattttgaagaagctcttcgtaaaattttgaaggacgaccactcattgatgagcatttagctttttctaagcaaagatgtgtggtgagaggagaagcgccatctagacgtttcataagtaataaagagcttgtttcatcaacaatggctatactaactttaaagttgtgttcaattgcatatttctgagcttcttccattaaaaactcagcatctgctaatgttaaataatatttacttttcatttatgctcttctttcctgagtaagctaaaaattattttagtgtaatattacagtaaaaattaattatatctatagttgaattgtcactaaatgctgatgttagaaataaaatgccggttgggtaaacgcagcattttattcgatatataaaatcatgtttgggtaaaactcgatttcaaaaaaacatcagattaaatgcttttatgtttaactttgtcgataagagtagtcactacaagaacaactaaagatgggatcaaccatgccaagttttgttcatttaacggtaagtgttgaagaaaattagggaggtagtcaccaaagcctgcaactttaagcccgtcaataattccgaaaattaaagcaatgcttgttactgaaccgacaataaaagatggtttgtgccaaaatttccagaagaaactgagcataataactacaattgcaggtggataaattgcacttaaaactggtactgatacggcaattagcttagtcaatccaaggttggaaataatgaaagagaaaccaaccaagatgaaaactaaaagcttatatggcaacttagtaagttgagcgaaatattcagcacatgcacaagttaaaccaattgcagtaaccatacatgctaagaaaatgagacctgttaagaagagtgaacccatattcccaaaagcatgttgaacatatgcatgtaggattacagcaccatttgctgcattaggagcgacttcatgactacccaaacctaatttaaataagcttaagtaaactaaagtaagtcctacaccagaaataaggctggcaataattgcatacttggttactagcttgttgtcagtaacaccacgcgaatagatcgcttgaataatgacgataccaaatactaaggcacctaaagtatccatggtgagataaccatttacgaaaccttctgaaacaggagagttaacgtaatgattaattggagcaggaacataacccgcaggaatcataaccgctgcaatacctaaaattgctaaagcgataattttcagaggagctagaacatgtccaactgtgtctaaaagcttgttcggatataaagaaacgacagttacaaatgcgaagtaaattgcactataaattaaaaggctactgctagacgttccaaaataagatgagaaaccaatttcataagaaacagttgcggtgcgtggtgtagcaaataaagggccaactgatagataacaaactacagttaagatcagacttgcgatacgacctagcggtgaactaataatttcaatggaaccctgcatacgagagagggccataatggtaattacaggtaaaccaacggcagtaatcaaaaaacctatggcagctagccatacatgatcaccagcttgttgagcgacaatgggaggaaagataatattgccagccccaataaagagggcaaaggtcataaaacctaaggcaataatatctccggtacgaagctgttgcataaattaaatttaacaaaaaagaaagaattttagagcaaaagaaatcatgatcaagcgctattttatgtgaaaaagcttttttttaggccgtatcaatcatccagagatattaaaaatatcaactggttaagttatctacttgaaaactcattgaaagaaataaagaaaacattttttaggtctgaatttttaaagaaattgtgtaaaaatgaaaatataaatttctattatgaatgttgaatatttggacattaaaagctttccgcctatcctatatccattctacaatattctaaattaactaacatttttgtaggcgtggtaaaagcagtgtctacgaggataaaattgaatgagagcttctactgttacaattaaaactgaacaagatctagaaaaattaagagtttctgggcgtttggctgcacaagttttagaaatgataggggagtatgtcaagccaggcgtaacaactgaatatttagacaatatttgtaatgattacatcgtaaatactttaaaagttataccggctaatgtgggttatcatggattcacaaaaacaatatgtacttcagtcaatgaggtggtatgtcacggtatcccttctcaaaataaaattttaaaagatggcgatattattaatattgatgtagcaattattaaagacggctattttggtgatacgagccgtatgtactatgtcggtaacgtaaatccacatgctaaaaaattagttgaaactacttatgaagcaatggtcgctggtatacatgcagttaaaccaggggcgactttaggggatattggttacgctattcaatcggtcgctcatcgcgaaggatatagcattgttcgtgaatattgcgggcatggtattggtaaagtttatcatgaacaacctaatattctgcattatggacaacgcggccaaggtcttgttttgaaaaaagggatggtctttacaattgaacctatggttaatgcaggcaaacctcaggtaaaagagctaaatgacggctggaccgtaattacccaagatcattcgttatctgctcaatgggaacatatggttgctgttacagatacaggatttgaattattaacgccgtggcccgaaggtgtgggaaattatccagaaatttaatatgcataaaaaaagttcgataatctatcgaacttttttatgtggctttgatttatggatgttctgaaagatgttctaccaaataatcaataaatacacgtacagctggcagtaaacctcttcgtgacggataaacagcatggaatataccgtgggctgctttccaatctggcaagatttgtacaagttgacctgattttacaaaatcctcagctgctgtgtcaggtagcaaggcaataccacaattttgacttgcaagttgggcaagcatataaatatttgttcccatgatagttgggctaactttcactttcttcagttggttgtctgggccatgtaatataaattgttgatctaaatgttcttcagacaagcttaaaatacgatgatcacttaactcatcaggtgacttaatattaccaaactcatttaaataagcttggcttgcaaagagactttgttctatgagtgcaaactgtcttagtaccagactagggtcatcatctagtttagatctgactcgtagagcaatatcaatcccttcattaattacatcaacgcgtcgattacttacaataagttgtaatcgaatttcaggatatttttttaaaaatgctggcaaaattttgggtagctggttttgtgctatatctacaggaacgcttactttgactacacctcttggttgaatacttaagtgatcaaccaaatcatgagctgcttgtgcggcattcatcatgacttgggcgtgtctataaatatccataccaatatcggtaactgcaaaatgacgagaactgcgctgaattaagcgaacccctaaattttcctctaagttataaacacgacgacttaattttgattttggaatatccgtaacacgttcggcggcactaaatccaccatgctcaacaacaagggcaaaacaataaaaatcatcaagatctgtgagcattaaaatatcctatttatgcaacactaaagattttacattattacttttgcaacgataaagtttgattttaattttttgtaaaaagcttattaataaaccttaaaagagatgtttagatgatttgaaatttcattgtaattacatttaaattattttgtaatttaatttcttaaattaatagacaaatatggcgcttataagctaattctcctaaaatatatttttctcgattttttaaataatatgtcttaccagttagttgaattagagaacgcaaccgctaatattatttgcccgatttgtaagcttgccgttattgattggacacaagagcaatatgttcaaccttgtgaacatacagtatttattgcaatggacttaggatttgagtttgttgctgaccgttttgaagaagttatgaatcaaaacgtagatgagttacatgaagatccgaacataaatatttttgatgcaataacgactacaccatataaaaatttaactattttaaaagcagatcttggtgtagatgggctatttcgttatgtcggtataagtgattgttaaatttataagtataaaaaagcaatcaaagccaatctttcgattggcttttttattattaagcttctggagctgcgctgtattgttcgattaatggttttaattcgccattttggaacatttcaagcatgatatcgctaccaccaataagctcgccgtttacccataattgtgggaaagtaggccagtttgcaatttttggtaaagttgcacgaatatcagggttttctaagatgttcacatatgcaaatggacgaccaatttgactgagcgcctctactgcacgtgcagagaaaccacattgtggaaactgtggagtgcctttcatgtaaagtaaaacgggatgcttcgcaatttgatcgcgaattaacgcttcagtatcacgtgcttgttcagtcataaatagatcctcaactaatcttgcagcattatagggggtgttcacatcgctttgcaaaccgccttgttgcttaaagttgcacagaatattcaatattttattgtataaaccgaagcgatagcaaaaagcagacgaaattttagataaatgaatgatgagacttttcatcagtgcaagtttttgtttatataaacccttcttaaaacctcatacagacagagttcgtgatgactgatattaccctagctccagtacaacctgatcaaccaacacatttaatggctacttatggtcgccaagcgatcagttttgttcgaggccgaggggcgtatctttatacacaagatggtacagaatatttagatgcactcactggtattgctgtatgtggtttagggcactctcatccagctattgcagaagccattgcagagcaagcagctacactcgtgcatacgagtaatttgtttgaaattccttggcaaactgcggctgctcaaaagcttgctgaagtttcaggtatggaagaaattttcttttcaaacagtggcgccgagtcaaatgaaggagcaattaaaattgctcgtaaatttggtactcaacaaggtataagcttgccaaagattattgttgctgagcagtcctttcatggtcgtactttggcgacactttctgcaacaggtaacaagaaagtacaagacggttttgcacctttagtggaaggctttattcgagtgccatttggtgatattgaagcgattcaagaggctgccttacagcatccagatatcgttgctattttaattgaaccaatccaaggtgaaggtggtattaatactgctccacaaggatttagctatttagaagaagttcgccaaatttgtaaccagcataactggttaatgatgctagatgaaattcaaactggtaatggtcgtactggtaaatactttgcgtatcaacatacgaatattattccggatgttttgaccacagcaaaaggtttgggtaatggttttccggtgggtgctgtaatgactcaaggtaaagcagtaggcttgttagggcctggcagtcatggttctacttatggtggtacagtattgggttctcgtgtggtttacacggtaattgatacgatccagaaggaaaatgcagtagagaatgcagcagtagtgggtaattatattgttgaccaattacgtgcccaattgtcggataagaatgtgcaagtacgtggtttcggtatgatgattggtatccaattacctaaagattgtgctgagctcgttgcgattgctcgtgatgaatacaaacttattattaacgttacggcaggttcggtggtgcgtttattaccgccaattaacatgacacaagctcaagctgatattttgctagagcgtttagtcgcattaattacgaattatctttaagtttaaaaacaataaaaatgggcgttaatcgcccatttttatttttgtatttagcctgaaatatattgctttaattgttcaatcaaaactttctggtcttccattgcggctttaaccaaatcaccaattgaaatgaaaccaaccaattttccattatctaatacaggtaagtgacgtaaatgacgatcggtcatgagctgtaaacattcttcaaccgtattatttaaacctaccgtgatcacttttgctgtcataatttcagctactgtagtgctataagatgagcgctccataagcgttacttttcgtgtgtaatcgcgttcagataatattccaacaacttgttcaccttctgctacgactaaagcaccaatacctttttcagccataatcgtaattgcttcgaggacagttgcttcgggtgaaattgtaaaaatggcttgttcagatttgttcttaattacttgtgcaacgatagtcatttcttctgtcctgttgttttatcattttgatttaaattagctcgatttttgaaaaatgcaaagacttgctagtcattcaaatataagttttatgttcaagcgttcaaaaagcacgctatattgggtagctcaaagaaactttaagctacctgccattttggatgattaaaaaagaaatgatgcatttgctgtgtagataacttcaacttgcgatgagatgagttaaataaagcaggagtgacttttaaccgtgttaaagtaggtaataaagattcatggaagtcttttggggtaatttttcttggcttgtaattgggccagtgagttttggcgtatcgatgtgcttgtactccatttagccagaacggaaaaataaaatcttcctgatctgatttaatggcccagccttcatcaaatagtccccacagaaccccgcagtacatcatggttcttaaaatataaatcttgatcatcaagtctttagaaaccggttgtagattacttaaactgttcattttaaatttaaaggttttcaacttgtcctgcttattataagagaaacacatgacatttcagtttaaacaggtgtcaaatcgtaaacaaatattgatgactagaaatatctatacaaataaatgctggataagggtgggactttctaagtcacgactgaagtggcgaagtaaggctttagataaataggtaattttggttttgtataggtataaaaaaacgccacctgagcaagacaaagcggctaaagctttggggaagcgcaagatgaacatagttatggttaatttatattgaactttttacaggtataaaaaaacgccacctgagcaagacaaagcggctaaagctttggcgaagcgcaagatgaacatagttatggttaatttatattgaattttttacagacataaaaaaacgccacctgagcaagacaaagcggctaaagctttggcgaagcgcaagataaatatagttatggttaatttatattgaactttttataggtataaaaaaaacgccacctaagtgacgtttctttatgcttgcatcgtggctagtttctgccagtattgtgctttcatggaatcacgttcaacacggaaaccttggtagtatagttctgctaagaacaaagcagctttaccgtgaccagcacgagcaacttcttctaactgtgcaactgcatcttggaaattcatttgagactgaattgtgttaaccgcagttgcgtatacatgttctaaatcatgatgagagatacgttgaatcatataaaactccttattgtaattatgattactttttctaaaggccactgcctttgaactaatttaacttagaattgttaaactaatattacaaattaatggatttgtcaaccattaagaagcatcaattagttcactattaggatacatgattaaacattattcacaaataattttgagtaaaatcaatatgagaataaaagacaaggagaataactatgacaaatactattgatggctttgtttttgataatcctcctaaagaggagcaaatcatagaacttgcccattaccatcgtaaattattagacgaagcaattttccatcaagaaatacatttaggggattattgtttagcacaaaggaaacgggttttcgactatgctcgtcaattagaccctaatcaaaaagcttggttctatcaagtttatgatggtgaacttagaaagattgcagatgaagatgaattgcacccagcagatgcagaagaaggtttaagtatttttgctatgctattagtattagttattattgctgcaattttatacttctctgtaattcgttccttaatgggctagcaattgtcatccagtaaggttaaagaataatagccttactggattttgaccttgtgctgaagtgcattgaaccctacactacattcattagaggtaggtcatgctcacattcaaagaaaattttcttaaattaaagtctgagttaaaggcagatcaatgttttaatctggttgtgattattatcattggctgtatttttatgctgtcttatttggcattactacgtcctgtgaattcagaacagtatcaacgaattgtgcaactttctcgacaggctacttatccaagaactcaagatatggccgagttgattatggctcaatcagaaattcatagagcagagtatttaaagttaatgcatgcttatcagtttgaacataatcatatcaagcaatatcctgcattagcgcaagaagatactcaataagtattgtctttatttcaaaaaggttttgcacgctattgaagcaggcaaaaatttgaatttatgctaaactttccgttttttaacacgctgcttttcaaggaatcggcatgcaacaacaatcgaatatgcaaaataaattcttgatagatgctgagatcggggatgacgatgtcacattgcctaatttacctgctatcgatgttcctatcgttgagtcacctgttaagcaagaagtaaaagctgaagaagttgtcgaggctgcaccttctacagaacctgagcaaccaaaatctggtttctttggacgaatgaaagaaggcttgagcaaaactcgccgtaatttcaccgatgggatggttaatatcttaattggtgggaaagaaattgatgatgagttgcttgaagaagtcgaagagcaattattagttgcagatattggtgttgatgcaacaaaaacgattattaccaacttaactgaacgtactgctcgtggtgatttgatctattcacattcactttataaagccttgcaagaagagttagttgctttgcttgctccacgtgtgaagcctttgcatattgaccctaataaatcaccttatgtgattttaatggttggggtaaatggtgttggaaaaacaacaacaattggtaaattagcgaagcgtttacaaggtgaaggcaaaaaagtgatgttggcggcaggtgatacattccgtgctgctgctactgaacaattgcaaatctggggtgagcgtaacgatattgctgtagttgctcaaggtcatggtgccgatagtgcatcagttatttttgatgcttttgaaagtgcgcgagctaaaggtattgatgtactgattgcagatactgcgggccgtttgcataacaaaagtaatttgatggaagagcttaagaaagttaagcgtgttatgcaaaaaattgatgcaacagcgcctcatgaaattatgttggttgtagatgcgggtactgggcaaaatgcaatcaaccaagtacaagaatttgaccaggctgtcggtttaacaggtattaccattactaagttggatggtacagcaaaaggtggagtattatttaatattgctagtcgtactcatgtgccaattcgtttcattggtgtgggtgaaaaaattgatgatttaagaccattctcggcgaaatcgtttgttgcagcactatttgaaactgaaaaataattcttagccaagacttaagaaaaacctcacaaaatagtgaggtttttttatatccatatctttttttattgttgcgaaaataaaacgaactgtcatatttttaatgctgattataagaaatgagttccatagactatattcattcccaaacaacggcccctggtcaattaaataggtaggaaataaaaaatgtctactttcttagataaaattaaaaaccgtcgtactatttatgcaattggtaaaaatgttgcattagatcgcacaaaaattgaagaaactattcgtgaagcggttaaacatagcccatcagcgttcaactctcaatcttcacgtgttgttactctttatggtgaatcacatgctaaattttggaatttagttcgtgaagcattacgtaaaattgttcctgcagatgcctttgccggtacaaatgcaaagattgatagcttcgttgctggtgttggtacagtactattttatgaagatcaagctgttgttaaaagcttgcaagagcaatttgaattatatgcagataacttcccagtttggtctgaacattcaagtgcaattgctcagtttgcgacttggactgcgctttcagaacttggtttaggcgcatcgttacagcattataacccgattgttgatgctgatgctgctgaagcatttgatgttccagcaacttggaaattacgtgctcaacttgtatttggttctgttgaagcaccagctggtgaaaaagcatttattagcgatgaagatcgttttaaaacattcaactaaattgagtggatgaaaagagtacctagagggtactctttttttatgcttttaaaattagttagaaattaatgatcaataaaataggtgtttattagaattcaaaaaaatattttaaaagcttgagcggcggctttgtaaacaggaggttgtcataaaatcgtcataatcatattgcatattgctcatgtttttacaaactattaaatattacagagacgtgaacagatgactttaagattaagtgtcgctgcgatgggtttattactcagcggttcagtattttcagcagttacaattacagcgccagaggaaatcgtaatccttgcggtgaatggtcaggaagtcaactctggattattccgttcttctaaaaataattataaagtcgatgctggtgagacaagcctaagtgtacgttatcaagaatattttgagcatttaagtggcgaacacgatattgttaagtcaggagtggttaccattcaaactccagcgcttaaagatggtcaaacttataagcttgcaatggtagatgctccaaaacaatttgaacaagccaaaaaatatgctgagcaacctacagtggctttatataattcaaataatgagttaattgttcaacaaactggtgccaataatgaggcaaggccgtggtttgcatcgggattgctagggaaagttactgatttcacgactaaatcatctaaacaacaacctgacgctgtgtatgcagctgcaaaacctaccacgactcaagctaatgcacctgttgcaacaactatgcctcctactggtgtagcacaaactaatgatcagcgtttggcagaaatttggaaaaaatcttctaaagcagagcgtcaaaagtttatggcttggttggctgagcagtcgaattaattgctattcaaaataaagccgatttaatatcggctttatttttagaatattttaaatagcctaagtatatttatgatcaaattaaatttccgtttagcagaatttagtgacatcccaacactagtagagttgattaatcagtcatatagagaacaacaaggtagaagctggactactgaagttgaatatgtaaaagggcaacgtattaataaagagcaattgaaacaacaattagaattacctaattcagtattattaattggagaaatagattcttcaaaagttgttacatgtattggtcttacatttcaaagcaatacagttgagataggaacattttgtacagatccgcatgttcagaatatgaaaataggacgttctgttttggagtacgctgaacaatttgctttacacaaagtacctgaattggacagcgcaatcatgtatattttaaatgtgcgttcagagttaattgcttattatgaaagacgcggatatataaaaacaggtaatcatgaaccatatccgcttgacgcaaatgttggattaccacttataccaattaaactaatcgaaatgaaaaaggacctcaaatgaggtcctttttgtttaggttagaaaccagatgtaatagcctaaaagcatgagaggccaagctatccatggactaaacaaccatttccataaccagaagtgcggcacaaaacccactccataaatgaagcctccggaaatacccaccatcaccagcataagctggctatgattgtagtgtccgtttgcatctaacatgagggaaggatgcaccagtaaaattacagcaagcggcaatgccaacagaaatgaaatggccattgcgaatgcttgagcttttcgttgatttgatgctgtcattgcggttgccatgatttattcctcatctaaattttgatgatgttcgatataaagagcactcaatacacccgcgaaacatgccatcaaaattccaagaatccatgcgaaataccacatttgcttctccttattagtacaggctatgcgagtttgactcgatatgtttattagtaataacgccccacattttgtaatacgaccaactggtgtagatcaaaatgatcggaacgaatatgcatgcagcaacagtcataacccctaaagtacgatgacttgatacggcatcccacattgttaagctagagtttggattaacacttgatggcaataaaaatgggaagagtgcaaaaccggcagttaaaatcgcacctacaatcattaagcttgtgccagcaaaacttaaacccgctttggcttttgatgctgtaaagaaggcaataattgcccctaaaattgccagtacaggagctacttttgtaatcggatagctgctgtagttattcatccagcctgggttgttgtttgtgactacttctttggctaaagggttaagtgctgcgtttggatcaactgcagcagcatagctataacctgggacttgaccgaagtacaaccatgcaccaattacaaggaaacaaactaaaaatatggctgccataatttgagttgctttagcagagcgttgtttcaaggcaccgtctgtgcgtagcataagccaagcgccgccatgagcacacaacatagaaaggctgacaataccgcaaattaaagcaaatgggttaagaagagcaaagaagctacctgaatattccgagcgtaatgtactgtctaaactaaaaggaatacctaagaataaattaccgaaggcaacaccaaaaacaagtgctggtacggcaccaccaatacaaagtccccagtcccaagagttgcgccattgggtattttcaagtttagaacgataatcaaaacctacaggacgtaagaacagggcaaatagcacaagtaataaggcccaatacattccggaaaatgcgaccgagtataccattggccaagctgcaaatagtgcaccaccagcagtgataaaccagacctgattaccatcccagtgaggtgcgatcgtattaatagcagcacggcgttcgttatcagttttaccaacaaaaggcatgagtgccattgagcccatatcgaaaccatcggttagggcaaatccaatgagtaggactccaactaacacccaccatatgatttttaggagttcgtattcaatcatgataaagcctccccattaacagctgcttttggctcttgtttttcaaaatggtatttaccagtgtgaagtgagcttggacctaagcgagcaaacttaatcattaagtacatttcaataatcaaaagtatggtatagaacgctgccagagcgagaattgagccccacacatcgcccgtacttaaacttgaagctgataagtgcgtaggtaaaatttcaccaatagaccacggctgacggccgccctctgctacataccaaccagtttgtgcagcaatccacggaagtggtagggcaaataatgcatatttaagtagccaaggtttattctcagcatttcttttcgctactgcccaagttgctaaaatgaaaagaagcagcattaagaagccagaagcaaccattgcacggaaagagaaaaacagagctgtaacattcggaatagtatcttttaccgctgcttgaatgtgctgctcgcttgcatcgactacattcggagcatatttcttaagaagtagaccatagcctaagtctttttgatttttctcaaatgaagctaataactctggtgagcgatcaccagcacgtaatttttcaagctcagcataagcaagcataccgttacgaatacgaacttcgtgctgttgcattaagtctttcaaaccagtgacttctttcgtagttgaacgagtggcgatgaggcctaatgcgtatggaattttaactgcataatctgttcgcatttcttcatggtttggtacaccaaacaaagtaaacggagcaggagcagggtgagtatcccattcggcttcaattgcagcgagtttagttttttgaacatcacctagttcataacccgactcgtcaccgagtaaaattactgaaagtgtagaagcaagcccaaaaatggcagcaattgcaaatgaacgacgtgcgaagggaaggtcacgttttttaagtagatagtagcttgaaatggcgagtacgaaaatcgcacctgttacatatccggcagaaacagtatgtacaaatttaacctgtgcaaccgggttgaaaataagtgcgccgaaatcaacaagctccatacgcatagtttcgaagttaaatgctgcacctacagggttttgcatccagccattcgcaactaaaatccagagcgctgacatgttagaacctagggcaactaaccaagttactcctagatgttgaactttacttaagcggtcccatccaaaaaagaatagaccgataaatgtagactcaaggaagaatgccattaagccttcaattgctaatggtgcaccgaatatatcacctacataatgagagtaatatgcccagtttgttccgaactggaactccatggttaagcctgtagttacgcctaaggcaaagttaataccaaatagttttccccaaaacttagtcatatccttgtaaatctctttaccagatataacgtaagtggtttccataatagccagaataaatgcaaggcctagggtcaaaggtacgaaaagaaagtgatacattgcggtcatggcaaattggaaccgcgaaagatcaaccacgctttcagaaatcatcaacgtgtctccttaatgtgggaagagttatcgcctgcaatatgctcggcgacctgattgtcaaaatttttggggatagtaggagcgtcaaaccaaatatgtttgattgttaagagaagcgcgactttaattattagaataattgcgatttctctaattaatcgggagttaatatctagatttttaaggctcataaaataaacctcgatacatattaatttcattattaatcaaaatatattaaaaataaacaataaatatattttaaataaaaacttaattatttttttaataaaaatcatatgtttaataatttaaataattattaataaaatatctgactaaaatggtttgaattaattattaaatccaactaaaacacttgtatataaaaatattaagttgattaaaatagtttgatttatatttaattctgattaaaaaggttggatataataaagtattttttatttctaactaaaatggttggtttaatattcaattaaaataacagtaaaataaaggcaataattaaaccttttaaaaagcaattaaagacgagaagaattattaataattaatcaggcgcgaaaaggtcattcgaaacagaaattttcttggcaacataatggcttttatgcactttgataagaatgacttgtgaatatagttctaactcaccatactcaggttcaacctggacatagtgcagttgtccaaactcatcacgtacacgagcttgtgctgaaaaaccaggtcttgcactaccactggaaatagttgctagacgccctaaaaggttatagttggtatgtgtaagcttgggtttaatgacttgatcaaggcagtgaatcataaatacggtaaagaaaatcgcgatgaccagtgcagggatgattaagtaaaacggcgtgataaagtaatgctgtatagcaaagaaagaaagctgtaaaaaataaccggcaaaactgaaattgatgagtaaaaaaacaaaaattagagctttagaaaatttaacattgagcaaaggggaattggtaagccaaactggcgcaattttttttaatagctggcttggtcgtaaaccaacatacataccaatagtttctaccacgctgagcaatatcaaagccacaacacttaaatgaaatggcataagataataattaaaaaagaaatcagccatggtagaaactctaatgttgatgatctcagtctacgatataaataccgccatctgaatgcaccttaatctcaactttatttagaaactcacctaaacaaggacctgaaatacattcaccagtctccacgttaaataaagcaccgtgggttgagcattggatatattcttggtcttgatctagaaattggttttctagatattcaagttcggtttgcaaatgtgggcataaattctgataggcgtagaaagagccatcacgctgtgtaatgaaaatagtagttccttgtaaagtgtcaaaagctctagcttcacgctcaggaacttcttccgtcatacagatcctctccatttcaagcacattccttctgaaaattttcgagaagtttagcatagtcattaatggctaaacgaggaccaaattgagacacgacttcacttgaaattaagatggctaactgtgcagcagcagttaaatcttcatgatggtttaatgcgtagaggaaggcacctgcaaaagcatcacccgcaccatttgtatctacagcttcaacatgacggcctgcgacgtgaaaatggtgagttggatttgcaactaaagcaccttttgcactttgtgtaatcacaacggtatggtttttaaaacgtaattgagtaagtgcatcttcaacagtagtggtattggtatacattaaggcttcttgttcattacagaacaataaatccacaccatcatccataagctcttctaggccttcacgggcatattgaaccattgcaggatctgataaagatagggcaattttaacgccgtgagcttttgcaatttctctagcttgttttaccgctttacgtgctgtttcacttgtagaaagatagccttcaatataaagccattttgctgtttttaatggttcaaaatcgatttggtcttgagagagctcagcggtaatacctaaataggtatgcatagtacgctcagaatctgggctaatcaggaccatacaggtaccggtcaccccttcactgatggactttggtgtagtctggatgcctgcatcatttaacccttgcaggtaaattccacctaattcatcatgaccaacgcggcaaccataaaatgcgctaccacctaatgcactaaatgctacagttgtatttgcagcagagccgccacttgcttgacctttgtaatcttgagtttgttttaatttttcataaagggcagattgtgtttcaccatcagacaactgcatggtgcctttttgtaagccttgctgactaagaaaatcatcagaaactttaaattcttggtcgattaatgcattaccaattgcaaaaagatctacagttgccatatgtgttgtcacagaataaaaaatcagatcgataagtttacaccattgctcacatttgctgtagtttgttgaataaaattcaggttattcagcggctagcagagttttattgtttgcctaagcaattgaaataatctttttaataaatattatcaattaataatgattcttgctaatatttacaaatctatactgtttcattgaaacttcgcctgaaatttttcgtagcgaacttatatgaagcgttcagttttatttatttcatcagttggggttatgacaagccatgtatatgctctggaagcagatcaacaggcagtaaccaaccttccaacaatttcagttaaagctgataaggaaatcagtttaaaacaagaagtggggcaagcatcaagtgcaactaaaggacttatgcaattaaaagatgtccctcaaattgtaaacgttgtacctaaacaagttttaagagaacagacagtcacctctatgcaaggtgccttgcaaaacgttgcaggtttaagctttagtgtaggagatggacaacgtgatcaggtcatgattcgtggtttctctgcaatcactgataactatgtagatggtattcgcgatgacgcattgtattttcgcgatatgtcgaatgtagagcggatcgaagttttaaaagggcctgcttcggtattatatggacgtggttcagcaggtggtttagttaacaagattaataaaaaaccaatggatcaatctttgcgtgaagtgagcctgattggtagtacaacaggacaacgccgcgcagaagtcgatgtaaatgaaaaagtcgcagagaatgttaaggttcgcctaactggtgcagttgaagattcagatggttatcgtgatcaggcttttttaaaacgtcaagcggttgctccatctgtacagtgggatattactgataaaaccaaacttttacttcaggccgactatttgcatgataaccgtttggcagatcaaggtttcccaacagacccgattacaggtaaacctgttaaaacaaatcctaaaactttttatggcgctttaaatggtaaagaggttggggatgttgacactgaaatctcaagccaaactatcagcttagaccatgagtttaatgataattttaagtatcatggtgcagttcgccactataactactcacttgatcgtcaatatagtgtagattcacatccagctgctgataagtcaaaaattactttaacccagaataaacgcttgcgtaatgaagatggtgtgtatgttcaacaagagttgagcgctttatttaatacaggttttttaaagcacaataccttaattggtgctgaatatagcaagcagcataaagatgagatactttggcaaggtgctaaaacaaccactgatttatataatcctaaattagagtattgggcgcctattaatacaggaactacaactgcacgtaataacaatagcaatacttttgaaaactacggcgtgtatctgcaagacctaatgacagtgacagatcagcttaaagttttagtgggtttacgttatgacaatctatcgcaagatcgtgatgataaaacgagtacgaatttagatttaaaccgtactgacaatacttattctccacgaattggagtggtctaccagccagtaaataatatctcactttacacttcttataaccgctctttccaacctttggctgattcatttgttttttataaaaatagtgatgacttaaggcccacaaaaactgaaaactatgaaattggtgcaaagtgggatgtaaatgatcagttgaatgtaaccttggctttgtttgagatgagccaaactaatattcaaaaccaagatccagcaaacccaaatcaagcattgttggcaggtgagcaaaaaaccaaaggtgttgagctttcattaacaggtcaattgaccgatcaattgtcagtattggcaggttattcgtatatggatggtaagattgaaaaatcggctattggttttacaggcaatcattctgcgctcacgccaaacaatactgctaacttatggttaaaatatcaaattaatgatcattggtatgcagctgtgggtggtcgtggtgaatcatcacgttttagtgcgccagacaacaaaaacgttttaccgggatatgcagttgtaaatgcggcgttaggttatcaaagtgaacgttatgatgtgaacttaaacttaaataacttgtttgatcgcgattattttgtgtcaggtcatagtggagcaaatgattcgaacatgatgggcgatcctttaaatgctcaagttgcacttcgctatcgtttttaattaaaaaaactctaaaaagctcatcatttcgatgagcttttttatttgtcgtgtaggatatagatagtattaaaaggttttgttctgataggatacaacgacgcgggctatgtgcttgatattaaagctatggctatgaaaactaatacttaacaaaaacatagtgttttgcttggcttttattcgccattctcaagccgactcaggctataatgagacttattcacttatccgatatgttaggagatcacatgactgtagatgtcactgaaaccatttctcaaactgttcaccctgcgtttcagttgctacgtcagcaccatgttgaagcattagatattttagtgtctgaatataagcataaagtcacaggtgcggtgcattatcacttggcaactgattatgatgaaaatgtatttcttgttgcgttcagaacacaacctatggactctaaaggaactgcacatattttagagcatactgctttatgtggctctgaaaagtttcctgttcgtgatccattcttcttaatgatacgccgttcattaaatacttttatgaacgcgtttacagcagcagattggactgcatatccatttgcaactcaaaataagaaagatttccaaaacttattatctgtttatcttgatgctgctttctcggcaaatttgaatcctctggattttgctcaggaaggtatccgtattgaacttgaaaatggtcagcctgtatataaaggcgtagtcttcaatgaaatgaaaggtgcaatgagtgcgccttctgatcagctttatcaccagttggctcatcatctattccctgaaaccacttatcactacaactcaggcggcgatccaaaagacattcctgacttaacgtatgaacagttagttgaattttataaaacccattatcatccgagtaatgcggtatttatgacttttggtaaccaaaccgcctatgaattacaagagcaatttgaaaaactggctctacataagttcactgctggtacaactttatattcgaaaccagaaaaacgcttaacggcacctgttgaagttactgaaacttatgctgttgatggcgatgagttaaaagacaaaacttaccatgtattgtcgtggttattacctcaggcgagtgacattaaacttcgtctgggtatgcgattagtagaaggcgttttactcgaaaactcagcttcaccacttcgtcattatttagaaacttgtggctatgctcagtcgactggtcctttaatgggggtagacgatagtaactttgaaatgacgttctattgtggtgttcaaggttcaaatccagagcatgcagagagctttagagagggcgttttaaacgttttacgtgaagtagctgcaaaaccaattgactcatcgttagttgatgcaattttgcatcaaatcgagttacaccaacgtgaaattaatggtgatggtacaccatatggcttaagcctaattttaaatgggttaagtggtgcgattcaccataacgatccgattcaaatttgggatgttgatagtgccattgctcaggtcaaagaagaactccaagacccaatgtggttatctaacctgattcaaacccatttattggataatccgcaccgcgtgcaaatgactttagtaccggatgcaaccaagtcagcgaaagagcaagaagctgaaaaagcacgtttagctgcaattggtgaaaagctaactgaagaagataaagcagagatcatcgctaaaaccaaggcattgcaagaacgtcaagatacaccagataatcttgaactgttgccaaaagtaggtctagaagacgtaccagctgacttgcatattgtacaaggtcaattgcgtgaaattatttgtaatcgaatggatacgccgttgaatttgtatcatgcaggaaccaatggtatttactatcaacaagtcctcattcagattcctgatgatgtggttaaatcaccatacttcaatttgctctctattttaatgggtgaagttggtgcaggtgagtatgactaccttgaactccagaacttacaaacagctgtaagtggtggtttgggaatgggtgcttcgttacgcagtaaggttgatgataaagacaaaattagtgcttggttaactttaacaactaaatctttaactcagaagttcgatgcgattcatttattaaaattagcatttgaacaacttcgttttgatgaaaaagagcgaatcattgagttattgcagcaacgtaagacacgctggcagtctcgtttatctggtgctggtcatagttatgcaatgcagattgcttctcgtaatatgagtgcgttagctcaacgcgactatcaaaacactggcttaggtgcgttgaactggttaggcgagcttgttactaaaattacccaagatgatgctgcttatgatgcgcttattgctgaattgaagcatattcatacaaaattattgcaagcacctaaacagttcctgctcgtatgtgaagagcatcagtcagagcgtttagttgaagaaattcaaaatgtttgggataaattaaacgttgatacagcagcaactgagttaacccaagttgagcaagaaaatgataatgaacatgaagcttggttaattcaaaccaatgttcagttctgtgcctctgcatatcaagctgtggaagtatctcatccagatgcggcacctctaatggtattggcagcttacttgcgtaatggtttcttgcacagtgctatccgtgaaaaaggtggtgcttatggtgggggggctagttatgacggaaatgcatgttcattccgtttctttagttaccgtgacccacgcttagctgagacttttaaagattttgaagcgagcgtgcaatggttgttaaacacagagcaacaacctcatcagcttgaagaagcaattcttggtctggtggcaagtatggacaaacctggttcaccagcaggtgaagcaataacagcgtgttatgcattgttgcatgcaagaactccgactttccgtcgtacattacgtgaaagattattgcatgtaactttagaagatttacaacgtgttgcgcgtcaatatttaattgaacaaacacctgtaaaagctgtcgttgcaccttttgcaaaacgtgatgaattgcaacaactgggctttacgatcaaacaagttaattaaaataaaaattggagatgaacatggcgttcagacaatttgaacgcacatctttacagctaagtatgggaaccctgcttagctgtttatgtgcgtcggtggcatatgccgacaccttagcccctgtaaaacctgcgagtgtagatgcatgtgttgcccttgcttcgaatgctgatcgcctagcttgttatgatgctgtgtttaaaccatcggccttaccagtagttcaagccgcagtagtaccagagcctgttaaaaaaattgataaacctgttgttcaacctgaaacatttaaagaaaaggttgtagataaggtaagtaatatcaaagtaattggtaaggcacctacacttgaacctactacgtctttactagatcaacgttgggagttgtctgaaaaaagtaaactgggtgtttggaatattcgtgcttatcaacctgtttacttgctaccagttttctggacgagcgataaaaatgagtttccaagcagtccaaacccaaataatacggtgacagaggcccaaaaccttaaatcaactgaaagtaaatttcagatttctttgaaaacgaaagcttgggaaaatatttttggtaacaatggtgacttgtgggtaggttatacccaatcttcacgttggcagacctttaatgctgaagagtctcgtccattccgtgaaacgaactatgagccagaagcaagtttaatgtttagaacaaactatgagttgcttggcttagatggtcgtttgcttggggtaactttaaatcaccagtcaaatggacgttcagatcctttatctcgtagttggaaccgtgtcatctttaatgtgggtttagaacgcggtaactttgctttaatgcttcgtccatggatacgccttgaagaagacagcaaagatgataacaatccagatatggaagattacatcggtcgtggtgatttaactgctttttataagtggaagcaaaatgacttctcattaatgctacgtcactctttaaaaggtggtgatgattctcatggtgctgttcagtttgactgggctttcccgattagtggcaagctgcgcggacacttccaattatttaatggttatggtgaaagcttaattgactataaccatcgtgcaacttatgccggcttgggtgtttcactcatgaactggtactaagtttgacctataaaatgccgcttttacagcggcttttttattaaccaatttgaatgttggcttgaggatgtttgagacggctttttttaggagtagcaattaaataggcgagtgttaaggggcctaaacggcctgcaaacataagtaggcttaaaataaataaactaccattgtgtaaatctggcgtgataccgcgagaaaggcctaccgtacaggctgctgaaacgacttcaaataataagttcataaagtctgctttaggttctaaaagtaaaagaataaagaacccgataaatatgagaatactggtaattgcggtgacagctaaggctttataagtagtttcgtgagaaacggagtgattgaaaaccctgatttcatcggtacgtcttaaaaaggaaagtacacttaaaactaatatgataaaggtgccgacttttatacctccagcagtactgagtgaacctccaccgatgaacatgagtagcatcataagtaaagaactactgttggtcattgctccagtatcaatagtattgaaccctgaagaacgtggaacagtcgcttgaaaccatgcatttaaagcttgatcacctacattgagcagacctaaggtatgaggattttgtgcttccaaaacccaaattaatacaaacgcaaccaaattaataatcgcaatagttgttaggatgagtttgctatttgggctgagttttttccattttttattttgtttgatatccatgaggactaaaaaacccagtccacctaatgtatagagcaaactaatcgtaatacatataaggtagttgctttggaagttaactaaactgttgctaaatagtgaaaaacccgcattgttaaatgatgagatactatagaaaactgcataatatagtcctcgagcaaagccataaatcggtgtaaatgcggtagttaagatcactgttccaatcagttcaaaaagaagtgtgtaagtaacaacaccttttgctacaaaagtaacctttgaaagactagtctgcccaaggctatcttgagccatcatttgctgtttaaggccaactttaggagataaacttaatgctgccaaaatggcaaaagtcataaagcctaaaccacctgactgaatcaataataaaataatgacctgtccgaaaagtgtaaaagattcatgaatatttaaaacggatagacctgtaatagtgactgccgaggtcgccgtaaatagagcatccatccaactaacatgtccgttattggcaataggaagtttaagcaataatgtgccaaagacaataaagcccagaaagcccagtgctaacagagaaggtgggcttaaatttagtgttttatgcggtttaggcttaagagacatattttctggttcgttttcttatatgaaacaatttgagagtttttttagctgctgtaaatgaccttctaaaataagaatatcatgcgtttgtaaagtaaaagtctcttcggtttcaaataaaatctgctgttgtctttttacaagaagcgtttttacttgaggggcttgctgcataattccgtacaaattaatgccgtttaacttctctggaatatcaatttttacaatatagtgctcatcatctaaagacatataacggctcaccattgggtagtttagtgcttgagcaacacgtacccccatgtcttcttcaggatgaatgattttattgatatttagatgagataagattgtatgatgtgctttggtttttgcttttacccaaattttatcaatgcccagattttttaaattcaacacacataaaatactggcttcaatatcttcaccaattgctacaaccactgcatcacaattttgaatgtttaattcatccaatacatgttcatctgtagcatcagcaatgacagcatgagttaaaacatcggcaaggttctcaacattctttttgactgtatcaataccaataacatcatggtttaatctcgtaagttcctgagcaacagttgccccaaaacttcccaagccgatgaccgcgaactgtgccatagttgtccttttatacttagttagggctttatttttaatgatattttctttgagataaagagaagcaatgtaaatataaaaaataataagcttaaatgataaaaaagccgacatatttgccggcttttttatcaaaatgaaaggttacttcaagaaacgtttatagcccacattgtcagtaatttctgcatatggatagctaatttgctccagagtttcaattaaaccatctgggttttgtttagcatctgttgcttgtaagccaactagtacacgaccttcagcagcgccgtggttacgataatggaacagcgtaatattgtgggttggacctaaacgagttaagaaggtgagtaaggcacctggacgttccggaaactcaacacggaacaatctttcgtcatccagattggcatgaccaccaatcaagtaacgaatatgcaatttggcaacttcatcatcagataaatcatctacaacataattttgctgtttaagttgttctaaaatttcatgacgttcagtgtcaccaccttttaagctaatacccacaaaaacttgtgcttcttctgtgttatttgcacggtagttaaactcggtaatgttacggccctgtagagcacggcagaagcctaagaatgcgcctttttcttcagaaagagtaactgcataaatggcttcacgttgttcacccaattcggtgcgctctgcaatgtaacgtaagcggtcaaagttcatgttggcgccgcaaacaatcgataccatgtttttgccgctaattttatgctcggcaacatattttttgataccagctagggccatcgcacctgacggttcaacgatgctgcggttttcatcaaaagtatctttaattgcagcacagatctcatctgtatttacagtaacaatatctggttcaacaattggtccagaattatctgatttgcgtagacgaacgatatcaaaaggtaaggcaccaatttgagcaactgctgtaccatcagcaaataagcctacgtggggtaggactacacgttcattggcttctagcgctgcttttaaacaagctgactcttcatattcaacaccgatgactttgacatgcggtgcaacatcacctaagtaagctgctacaccagcaattaagccaccaccaccaacagcaacaaaaacatattctacatcacgccattggcgtaaaatttcattcgcaattgtgccttggcccgcaataaccaactcgtcgtcataaggtggaataaaaactaatccttcagcttcggcacgttgctgagcgtatttgtttgcaatatcaaaactatcgccatgtaatacaacttggccacccaaacgcttcactgcctgaactttaatgtcaggggtagtacttggcataacaataattgcaggaatacctaaacgttgaccagacaacgctacaccttgcgcatggttgccggcagatgcgcaaatcacgccacgttcaagttgttctttcggtaattggctaatacggttataggcaccgcgtaatttaaaagaaaaaactggttgtaaatcttcacgcttaaaacgaattgtgttgtttaatttttgactaattcgtggagctgcttcgagaggtgtttcaattgcaacatcataaaccgttgcttgtaaaatttgtcgtaccacacgagacagcatgttcatcttccctataacagtttaaaataggaaattattgtagcaaacccttgtccatttgcgccgtttattggcgcataaatgtcaaaaaatagttgagtgatgtaatgagcctatatgcaacccaagatgaaaagaaacaagctgctgcgaaagctgctttaaaacacttacccaaaggtggcattttgggggtaggaactggaagtactgtaaatttcctgattgatttattgcctgaactacaattagaagcagcagtagcaagttctcaagcaacagcagatcgtcttaaaaaattaggcatagaagtggttgatatgaaccatgtgggtagccttgatgcttatgttgatggtgcagatgagattgatcgtcacatgcatatgattaaaggcggcggcgcagcattaactcgtgaaaaaattgtagcctcaattgctaaaaagtttgtatgtatcgttgatgattcaaaatgggttgatcaacttggtcgtgatttcccattacctgtagaagtgattccaatggcgcgttctgctgtagctcgtaaattggtaagcttagggggtgatccggtttatcgtgaaggtgtggtaacagataacggaaacgttattttagatgtatttaatttgaacatcttaaatgcaattgatttggaaaagacaattaataatattccgggcgttgtgactaacggtatttttgcgttaaatccagcaacgattgcaattgttgcaacaaatgatggtattgaagagcgtactgcacagtaatgtctgtggaaatgccagaaattaaaattgttcgtcacgtaagggcaagaaaattgcgcttacgtgttgagcctgcgtctatacgacttactgtgccgttattttgtagtaagaaacaaattcagcagtttttagctcagtctgaacaatggttaatcgagacgtggaataaacagcaccacgttcaatctacctcatttgaaattccttcagaaatttctttttttaatagagaacagccttttcaaattgttgtgcagaagcaacatcgcatttttcaatttgattgggaagatagttatttatttattaaagatcaacaaccctatcaagctttacaaaacgctgttattgcttatgcaaaacaagagttgccagcacttttgtcagaacttagccaaaaaactcgactgagttatgcagagtgtacaattcggcgtcctaaaactcgttggggaagttgcagtagtcaacataatattatgctgcatgcaggtctggttcttatgcctgctcaaattacccgttatgtttgcattcatgaactagcacacaccaaacacttcgaccatagtcctgcattttgggccgaagttgcaaagttcgaccctaactatatgcagcatcgcagacaattaaaaggtaatccattgcctgcatggtggtatgttacaacttagctaaagctacactctaattgtgttgtttgtaagacatctggtgctttgcggctatcaaggcctgcttgagcactaacaatcttgttcgctttaatatgtagctgtataaaattatattgctgtgttgaattgttaggttcggatgaacttgagttaagtaaataactataacttgcagcgtcggtttgcagtaagttatctgtactatctgcgcttaaggcagagcgatagctttgagagcctttaattaattcaatttgaccattagcacggaagttaagttggcagcctgttgtactgtcttcatagtgaccaactaaatagtctgtagctggtagttttgggtcagaaatattgatactagttaaaccttgtttacacggataagccgaaccattgcaggtcgttgtaataccactaaagccaacagcacgtcggtaatctcccgcaccatctatacggaaaaattcagatgtattaccagcaggtataatccccgaatattgtttcttgtccagtagatcataacctattgggtctaaatgggattgatcttgcaaatctgctagtttaaaggtggctgctcttagattagtggcaaaataatcacgtgttaccttttgattagctgcgatatctaaaagtgtgttttttgctggatcaatattatcaggggctgaggtgaagataggggtaaaagatgatttgtccccaataagttttttgccgtctaaatatccatcttttaaatctgtagcgagactttgggtgagatcttgataaggtgaattcgtattatggatgcttgaccaatattgaagataaccaaagcttagataactatccacataagtacttggctttgtggttgagtatttcaataaatttaaaattgtaagcgtacttgccggacttaaacttggaatattggtatctttaaacgcattaagaagagatctgtagacatcttgagaggctaagtcaacatgtaattgttcaatacgggttgggataattgtctcattaggcaactgacctgaacgaatcacagcacgttgataaattgcttctgaacttgggctgatcaattgtgttttattgcttatcgagcttggggtaataaaagcgtgataaacaccagaaatattttgatattcagatttggttggatcaaatacttgagatgagccttgggtcgtgacttcaacacgataaagacgatttagttttgtgcttggaagtttaatatcgtaactcgttaaactggcaacttgggtatcaatcaaaatactattgtcggtattatcatataccttgagttgaacattgcgcatttcgacaggggttttaagcgtaatatccgtcatgacttcaggagtgggttcagacggtttaggcgtgttagatgaacctccgctactgctaccaccaccacacccaacaagggctacacttaaaattaaagtggtgaggccgagataagtgcacacttttatttcttttgattgatcaagcatcctagctctccaaaaataaatttggtatttatttactgatatttgtttggtactgacaggccggcaagtgctatgtaattatcgtttaaaataaaaaattaaaattaccaagcatgaaatggttttgtaagcctagacatcctgtcatactaccgcaagtatagattcaaaatttgaggtaatgcacgtgatttctgtcggaattgttggtggaactggttatacaggcgttgaactattacgtattttattacgacatccaaaagcgcaggttcgagttctgacttcacgtacagaagcgggcaaaccagttgctgatatgttcccaaacttacgtgggcatacagatcttcaattttcagatttaaacattgatgcattaaaagaatgtgatgttgtattttttgcaactcctcatggtgttgcgatgcaacatgcgaaagatttgattgcggcaggcaccaaagttattgatttagctgctgactttcgtttacagaatcttgagcaatttgaaaagtggtatggtatggagcatgcttgcccagatgtactaaaagattctgtttatggtttaaccgagttaaatcgtgaaaaaattaagcaagctcaagtcattggtaatccgggttgttacccaacgactgttcaactgggcttggctccacttttaaaatcagcacaagcattgattgaaacaaagaatattattattgatgcaaaatctggtgtttctggtgctggtcgtaaagcaagtttgggcatgatttacagtgaaaatgcggataactttaaagcttatggtgttgcaggccatcgccaccatccagagattgtagaggctttggaaaatattgcaggtaagaaagatgtttttgagggtcttttatttgttccgcacctagtaccgatgattcgcggtatgttaagtacaatttatgtagacttaacagaagcgggtaaacaaacagacttacaagctttgtatgaaaacttctatgcaaatgaaaaatttgtagatgtcatgcctgctaatagctcacctgaaactcgcagcgtgcgcggagcaaatgaattacgtattgctttgtataaaccacaaccaaataaactcattattttggcggctcaagataaccttgtaaaaggtgcatctggccaagctgtacaaaatatgaaccttatgtttggctttaatgaagatgaaggcttacaagggattggtttattaccataaaaaactcttttttgcttcacacacatttaaatttcgatttaaatgtgtgtcttgactctgatcttaaacactgagatgacgatgcaaaactcggaacagacgacttctgtagaaagttcgttgcaaaagaaaaaatttttaaacaccaataaaccattatttattggtgccgctattttaatgagtggttgttttgcgctcggctatacaattgggcaccgtcaaggtttaactgttgttggttacgatgcagatgcagagcaattggttgaggtagtgcaaaagcaaaaaacagcattagatgcagttaacaaaagtttgaatgctgctgtacaagagcgtgatgttgctgttacaaatgccaatgatttgtttgaagcacttaatcaagccaatgctgataaaacgcagcaagaaggtatgagtaacatctatcgtgaaattttaagacaacgtggtggtttaagcttaacaattcagaatttggcgataaaaccgttaccggaaaatgcttatgaatatcagcttgatctggtacaagttagcccgagtaaacgccgtgcttcaggtttagttgaaataagactgattaaagatacagaagttttagtggtaccacttgaagataagaactttaacttcactgattttgagcgtttgactggccgatggacgatgcctaaggggttcacacctcaatttattgaagtgcgtctaacaggcggttctgatacaccggttattaagcgttttagttggcagcgtggtaaacctgtcgaaacaccttctgcttttgttgcagaaattcctcaagctgaagcaaattcacaatagtaacatcatatgcgaacaaataagcgtcaaacaaatttaaaagatattaaggcttcttttcagcagtctggctatgtcgattggcacttcaatccacgcttaagtgattcgcaaaacgaagatcatgacggagaggttgttgtgcaaacagcacctcccgaactcaagcgtcctcccttatatgcagtagtattattgaatgacgattacacgccaatggattttgtaattgaaattttacaacaatactttgcaatgaatcttgaccaagcaactcaagtaatgctaacagtacactatgaaggtaaaggtactgccggggtatatccaagagacatcgcggaaaccaaggcaaaccttgttaataattacgctcgatcgcaaggtcatccattactttgccagattgagcctaaagcataagggggtcacatgctcagtcgtcaattagaagtatcattacgtttggctgttagcatggctcgtcaaaagagacatgagtttcttacagttgaacatttactattagccttactcgataacgattcggctgtgaatgcattaaaagcatgcggagctgatattgtttctttacgtaaagaattagaagaatatgtagaacaacatactcctaagcttggcgaaaatagcgagcaagctccacatccaacagaaagtttcgaccgcattttacaacgtgcaattttccacgttcaatcaagtggtggtgaccgtactgttgaaggtgcggatgttttagtcgcaatgtattcagagcgtgattcttttgctgtttatctgcttaaacgtcatcaaattaatcgattgactttaactcaatacttgtctcatgggacacgtaaagacgaagttcaggttgaagaagaagttgaagacattgagggtgaaagcaattcaggcaatgctggaccattagaactttatacgctcaatttaaatgttgaagcgcaaaaaggtaaaactgatccactcattggtcgtgagaaagaaattgagcgtacagcacaaattctttgccgtcgtcgtaaaaacaatccattgttagtaggcgacccgggtgtaggtaaaacttcaattgcagaaggccttgcttggctcattgtaaatggtaaagcaccaaaaccgctaagccatgcagaaatttacagccttgatattggtgcattagttgcgggtacaaaatatcgtggtgactttgaaaaacgtttaaaacaattgttaaatgctttgaagaaaaatccgaatgcgattttattcattgatgaaattcatatgatcattggtgcaggctcaagtatgggcagtacgatggatgcttcgaatctcatcaaaccagctttagcaaatggtactttacgctgcattgggtcaaccacgttccaagaatatcgtcaggtatttgaaaaggatcatgcgttatctcgtcgtttccaaaaaattgacgtaaatgaaccgagcatttctgaaactattgatattttacgtggcttgaaaacgaagtttgaagatttccaccatgtacagtatgacgacaaagctttagtttctgcggttgagctttctgcgaaatttattaatgatcgtttcttgccggataaagcaattgatgtcattgatgaagcaggtgcacagcgccgtctaaaagcagaaagtgaagacagtttaattactgtagagaacatcgaagatatcgtttctaagattgcgcgtattccgcctaaaactgtatctaaagatgataaatctgtacttgaaaatcttgagcgtgacctaaaacgtgttgtatttggtcaagatgaggcaattactgcattagcttctgcaatcaagttgtcacgtgctggtttgaaatcaccagacaagcctgttggtagctttgtgtttgctggtcctaccggtgtaggtaaaactgaggttacgaagcaattagcaaaacttttaggtgtagagcttgttcgtttcgatatgtctgagtatatggagcgtcatgctgtttctcgcttaattggtgctcctccaggctatgtaggttatgaccaaggtggcttactcacagatgcgattcataaaaatccacactgtgtgttattactggatgaaattgagaaagcacatcctgatgtgtttaacctgttattacaaatcatggatcatggtgcattaacagacaataatggtcgtaagtcagactttagaaatgtcattattgtgttgacgacgaacattggtgcagaaagtatttctcgtgcaagcattggatttacagagcaagaccatagttcggacaaccaagaagccatgaaacgtgcattctcacctgaattccgtaaccgtctagatggtgttattcaattcaaagctttaccaaccacagtgattgaatctgtagttgataagttcttgacagaattgcaagcgcagctagatgaaaaacgcgtagttttagatgtcgatcaaagtgcacgcgactggttggcgacaaatggttatgatcgcttaatgggcgctcgaccaatgcaacgactcattcaagaacacttgaagaaaccattagctgaaatgatactgtttggtgaacttgcagatcatggcggtaatgtggcggtatcagtgaagaaagaagatggtaaagcagtgggtctaaaacttgaagtgtttgaagatcaccatacggcagaaccagcttaatttatgttaattgatagtctttctataacccgaatatttagtgtgttcgggttatttattattactgcaatcgctgagattttgggttgttactttccttatcttattttaaaagaagggaagtctgcgtggctatggttacctacagcactgagtttggcagtgtttgtctggttgctgacattacatccggcagcgtctggacggatttatgcagcctatggcggtatttatatttttactgcgcttatgtggcttcgttttgtagatcaggtcgctttaaccagatgggatatcttgggtggcgtaatcgtgctttgcggagcaggtttaattattttacagccccaaggattaatccgttaattctgagagtgattatttaaattttaagtgaaaaaaataagcaattttttcgcaaaaaatacttgtcaaagtcatcaacaatgcgtattttagatttaaggaacattttttaatatttgagataaagatgttaaatcaatctgtgaattctaacgcttacttttatttctggcaatttagatagttgcctgagcgtattcgggcacgagagttgcccatcacagttaatacctgatcggcaaccccgatcaggtttttttatgctttatctttttcaaatcgaggactttaaaatgaacaacatgacttattcatactttagcaacttttattggttttacttttgcctacctttgccaacgaatagatccaaaacgctcaaataaatgatcggactgattaggtttcagtccaaaggaaaagaccaatgaatgccttaaatactttactaactcaaagcaatacaaaagaaacaccagttagtttacctgttcagttaaaagctaaatacccgcttgtgcagaccttcgcacgacaaattgcagaacatcgtcaaattattcaaaatattcttgctggcaaagatcagcgcttaatggttattacaggaccatgttcaattcatgacccagttgctgtacttgaatacgcagatagattgcaaaaattacaagaaaaagtaaaagatcaaatcttcattgtgatgcgtgcttatattgaaaagccgcgtacaacagtaggttggaaagggtttatgtatgacccaaatcttgatggttcatctaatctacaattaggtttagaaaaatcgcgtgagctatatttacaaattattgaaaaaggcttaccgattgcgagcgaaattttaagcccaatggcaacaggctattttgatgatttattggcttggggtgcaattggagctcgtactagtgagtcccagattcaccgtgaaatctcaagtcatatgccatacagtattggcttcaagaatggtacggatggctcaattcaaattgctttagatgctattcagtctgcacaaaatgagcatcaatttttaggtatgaatcagcaaggtttgccttcagtgattcagagtgctggaaatccattgccacacttgattttacgtggagccaatcatggtcctaattatgatttggcttcaattcaggcaattagagaaaagcacaaacaaaacctacctgccttagttattgactgtagtcatggcaacagtggtaaagatcctttacgtcagccagaagttttacagcaaatcgttgctgaacgtctaaaaactcaggtaaagggtgtcatgattgaaagccatttagttgatggtaaccagaagatttcatgtgaaatgacttatggtcagtcggtaacggatggttgtttagggtggaataaaactgaacagcttttgttaaatgttgctaaacaattaaaagcaagtgaattagctcattcggcttaatgatgtaaacatttaaaaagggatctgttttagcagatcctttttttttaagaagcatgtttaagttcggataaaaaagtagtgatttcatgcccgaatttttttggttcggttaataatggcgtgtggcctgaacgttcaaaataaattgtttttgcatgttcgacactatgtgcaatcagggtttgccccgtttctggatagagtgtcgaattgcgtccaataaagaaagttgttgggcactgtaattgctgaagtgcttcacgataatcttcattgtggaaaagataattttcaacataccaaaataagtagtctaaacgttgaatcggaagaagatatttttgtaaaaatggttgttttaacgcagttttaaaaacaaaagggctaaatggattgctactttgcaattcaataaaatctacccacaaacgcaccaacttttgacggtccggaagtgataattcataaagatatttagcatttttatggattgataataactgataaatatcattgagtaattgtttaaattgggcatgtaatggcccaaataacccatattgccatgtagcatctactgaaattttaggcgtttgatcgatatgtaaataggcctttaactgctgagcgagatgagcatgtttcatgccatgcattgcagtggtggctcccattgagtagcccattaaaataaatttatctaattttaattgctcaattaagtgagcaacatcttgccagtggcttgatatggcatcttgctcgggaattgcacaattttttgaaccgccaaagccccgccagtcgggaataataaactcgtattctttacgatttgcatagataaaaggtagccattgccaactttgcatacctaaaccggataaaactaataccggttcaccacgaccaacacggcgtacaaataaactttcctgatcgggcatggtgtaataaggcatgattattctccagatacattatcttgagcaaagagttttaattgcgggatgacttgttccaaccatttgatccactcagtttccatagtaatgccgagttctaagatcattttatgaatatataacactcgattattcaaatcatcgctatctttaaaatctttatcgtaaatagtttggtaaagcttaagcttttcttgatgtagaccaagatgtcgtaacagttcgggtaatatttgattattgcccaattgcgcctcagcgcgcaatcttaccattaggtcatctctaagctgtgccggttcgctttgctgcgtcatccatgaagcgagttcaatacggccaagctgttcgacttgataagttttttttcggccactatccatctcattttctaaagtggaaacccagccttttttaagcatgttattgagttcacgataaatttgctgatgtgtggcattccagaaaaagcccatagatcggtcaaaacggcgggcgagttcaaagcccgtgcttggccgttctagtaaactggtcaataaaacatgaggaagtgacatggcaatccgtttgtaagcaaaagtaaagtgtgactcattagattatgcaacatgttgcataaaagtcaaaatttgattataaatttgtgcaacaagttgcattaagcaagcagattagcaagccaaggagttgttatgtcgttatatccacatttattaaaaccattagatttaggttttacgacattaaaaaatcgcgtattgatggggtctatgcatgttggtctagaagaagcgcctggtggttatgagcgtatggcagctttttatgcagaacgtgctaaaggtgatgtgggtcttattgttactggcggtattgcacccaatcaggcaggtttaacctttgctcatgcttctaagttagatagcacagaagaagccgaaaaacataaagtcattaccgaagctgtacatgctgctggcgggaagattgcattacaaatattacatacgggccgatattcttatcagccagagattgttgcgccttcggcaattcaggcacctattaatcctattaagcctaaagcaatgacttctgctgaggttcaacaaacgattgatgattttgcaaactgtgcgaagcttgctcaatacgctggatatgacggcgttgagattatgggttcagaaggttatttaattaacgagtttattgcagccagaacaaaccatcgtgatgatgaatggggtggtagctatgaaaaccgtattcgttttcctgttgagatcgtaaaacgcacacgtgaaatagtgggtgaaaactttattattatttaccgtttatcaatgcttgatttagttgaaggtggttctactttagaagaagtgattcaacttgctaaagcgattgaaaaagctggggctacgatcattaatacgggtattggctggcatgaagctcgtattccaacaattgccaccaaagttccaagagctgcatttacttgggtcactgaaaaattaaaaggtgaagtttcagttccattaattacatcgaaccgtattaatacaccagaaatggctgaacatgtattagcgtcgggtcatgcggatatggtttcaatggcacgtccaatgcttgcagatcctgattttgttttaaaagcaagtgaaggccgtagcgatgaaattaatacgtgtattggctgtaaccaagcttgtctcgaccacattttctctatgaaaattgcaacatgtttggttaatcctcgagcatgttatgaaacagaactaatctttaaagaagcacaaaatcagaaaaatattgctgtcataggtgcaggaccagcaggtttaagttttgctgtatatgcggcagatcgtggacaccaagttaaaatctttgaagcaagtcatcaaattggtggtcagtttaatatcgctaaaactgtgccaggtaaagaagagttctacgaaacattgcgctatttcaatcgtcaaattgaattacgcccgaacattgaacttgtattaaaccatccagccacttatgaagagctaagccaatcagactttgatgaaatagtagttgcaactggtgtaacacctcgtcaattacaatttgaaggtattgatcatccaaaagtgttgagctacttacaggtgcttaaagagcgtgcaccagtaggtcagcgtgttgccattattggtgcgggtggtattggttttgatacggctgagtacctaacccatgaaggtgaaagtggcagtttaaatccagaaaaattttatgaagagtggggtattgatactcactatgaacatgtcggaggtttaaagcagccaaaagttgaagcttctgaacgagaaatctatttgttgcagcgtaaagtttcctcagtaggtgcgggattgggtaaaacgactggttggattcaccgtaccgggcttaagaacagaaacgtgaaaatgttagcaggtgtgcaatacgacaaagtagatgatcaagggcttcatattactgttgatggcaaaccaacagtgcttgaggttgataatgttgtgatttgcgcgggtcaagaatcatttactgcgatgtatgaccaattaaaagcagatggtaagaatgttcatttgattggtggtgctaaagaagcaggtgagttggatgctaaacgtgctattcgacaaggtgctgaactagcagcggttctttaatggcttaaatgagcattgtcttgggtaagagaatgctcatcactaaaacctatttgaaggaaaaataaaaatgacactcgaaataactaaacagtcattagaaaaatggcatcacatgattcaatcaaatgacttatcgaacttaaatgatttgctggcagatgaagtcgttttccgttcaccggttgcttataaaccttatgagggaagacaagttgttttctttattctcaccaatgtaattcaggtatttcagaattttacctatcatcgagagttttacacggaaaatggtgaaaatgtagtgctggagtttagtgcgaatgtaggagataaatcattaaaaggtatcgatatgattcgttttaatgagcagggtaaaattattgattttgaagtaatgattcgtccattgagcggtttagctgcattagctgagcaaatgggcatacgaatagctcaatttaaacctcaataattttgttaaatagcctaagaaagaatattgaggtatataaaaatgtggttaaaactttcaacattttttttattacccgtattgttcatacaaggtcataaagttcgaaagaacacaccacgtttagcagaagccaaaggtgaacgagaaggtagagctggtcaaggtaaatctttatctctgcttattttgggggattctgccgcagcaggtgttggtgtagaaaatcagaaagatgctttgtctggtgctattattcaagaactgcaaaatgaattttccctacagtggaaacttcatgctaaaactggcgatacaactcgacaagtttttaatgctttgcagcatttagaagagcagaagtatgatgtgattgtgacatctattggtgtaaatgatgtcacaaagttgatctctgctaaatcatggattaaacaacagaagcaattatttgagcatatacagaaacgttttcagccaaagttgattatcgtttccggtgtgcctccaatgcaacatttcccggctttaccgaatccactagcttggttgtttgggcaatatgcagtgcaaatgaatcaaaaattacaacaatggttagcaccacaaagccattttaagtttcttgaatatgatattgaaacttttcaagccatgaacttgcctatggcaagtgacggttttcatccaagtaaagaagtttacgcagtttggggacggcaggttgcagccatagtgcggcaatcatttaactcatagtcataggtagttattggatatgggcatatctgtttttaataaaattaaagatttcggttcggagctgttcgatttagtgttgggcgctgagcatccaaaagtctattatcatcctcaaggaaaaataaaagatattttggataagttgccacaacttaaacagaaatatcgtcctacgccttggctcacaaatagtcatgttcacttactttattttgatcttattagaaaacaaacaataaagttggcatatgatcgaattgatcaactcactatgagtgatggtggtattaccgcaattgcttggtatggctataacttaccgccagatacaccaacagttgtaattatgcataccattacaggtacacctgagagtatgcgtgaattggtacgcgatttaaatcaatacacaggctggcgaattgcattatgcctgcgccgtggtcacgcaggtttgccaatgcctgtgccgcaaatttctctatttggttctacgagtgatttaaaagaacaacttaaccatattcaaagtttatttccggcatcggatttatatgcggtaggttcttcggcgggtacagggttgctagttcgttatttgggtgaacaaggcgaagacacaccttttaaagctgcgtttgcgatgtgtccgggctataacacggaaattggttttaaaaatgtccaccctttttacagcaaaatgatgactaaaaagctcttcaagtattttatttatccgtaccaaaatacatggagccagattgcatctttagagaaagttttatcagcaaccaatttggaagaatttgaaaaagaatacttcgagatggcgggttttgaagattatgagacttactgtaaatctattaacccgatttatgtgttcgaaaatattaaaattcctttaatgattttgaatgctgaagatgaccctgtgtgttctattaaaaatttagagccatataaagagccgattcagcagatgagcaatgttgctgtggtgacaacgaaaaaaggaagtcattgtgcattttatgaaggatggcgcagtacatcgtgggcagcacgtctcatggctgattattttttaattgaacataataaatagataatctttgaatataaataaagcccagatctcgggctttattttttatactttaagataagagggatgatctatcacttattccaagttttacttttgtagcggcaactaaagctttttcatctgtctggttggggtgaaaatcaaaacggtagtattcaagaaatttaggaatcaacactttatattgtttgctcgcaaagttaaaaaagttgcgccaagttttgaaattggtcagttgcttatctcgtttcattagagcaatatggtaaatagttgaaaaggctgtaatcagaactaaactgaatgtaaaaactgcaacacgtggaatatatgcatctaatccgttgccatatagatgttgatataaatcgaatgcaacagctttatgctcggtttcttctacactgtgccataaccataggttgcgaatagtgttgtcggtcataagctcatttactgattgcatcatgctgactaccagaacagctgtatagtgttctaatccaacagttaccaataaattccattttttactaaaaactttctcaatagctttaagaacaatacctgtagctttctctagtgattctggatttaaaccatattgttgtgcactgacatggaaagcatgatgttctttagaatgcattgcttcttgaccaataaatgcgcctatttctctgtctagaatttcattctctttagctttagctcgtaaagcacggacagatctaacaaagtatgattcaccttcaggaaataaagtcgaaagacccgtgaaatagtgggtgagagaaggctcatgattgcaccaatagcgcggagtatcttcaaaattgtagtccatgcggcggacaggaaaagaggctggtgtacggtttaaagctgttttcattttcttgctccaatcttcttttagattaagttccaaaaaggaacttgttaataaaaattataagcagactagattggagtcaataaatttcgaatgattgaaaatagattgtcctaaaatgatagacaggagagctttaaagacaaaaagtaataaaattaaatttatttgtattatgactatttatataaatgcccaaattaaaaaaataatttgggcattcttgaacagaagcttagttcttaagtgctggtgttgcagcagcaatagcagcagcaacggcatcatcttctgtgttcgcaggttcagttgccttagcagctggttttgactgagctttttccggtttaggttcagctttaggctcaggttttttttctggtttaggttctacttttggtgtctcagatttaggttgttcagcaacttgtgtctgtgaagattcatcagaacgcgcaggacgagtttcacggcgaatttcagttgtcgtgttagcagtttcttcacgatgaacttcaacttgtggttgctcttgaacttgagcttcttgagtatctacactctctaaagattcaaattttgcaggcttctgtggttgaggttctgaaacagcagtttcaaccttgtcttgctcttcttctttcggtgtctcttttttaacgcatgcggttaacaatagtccagccgcaattgcagcacagattaaaagttttttatttgccattgccctaaacaacatttaattgaggaattggcattataacagtaaatagctatgaaaaaatcatgtcagattgagctaattttttattaaaaatgctgatagaataaccagttgtttattgttctttgaattgatgcggtttgactttgctttataggggcagagtacagtaaaattgccaaacattgtaggccgatttcggcttgattgtacgagaaacttaatgacccattttatttttgtcactggtggtgtggtttcatcgctaggtaaaggtatttctgctgcttctgttgctgcacttttggaagctcgtggcttaaaagtcacaatggttaaaatggatccttatattaatgtcgatccagggacaatgagcccattccagcatggtgaagtttttgttaccgaagatggtgcagaaacagatctggatctgggttattacgaacgtttcttacgtcgcgcgaaaatgaccaaactaaacaacttcactagtggtcgtgtatatcaagacgttttaaataaagagcgtcgtggtgattacttaggtggtacagttcaggttattcctcatattaccgacaatattaaagaacgtgtactccgcgcgggcgaaggctatgatgttgctatcgtagagatcggtggtaccgtaggtgatatcgaatctttaccgtttatggagtcggttcgtcagttaatggttgagctgggccataaacgtaccatgcttatgcatttaactttgttgccatatattaagtcagcagcggagttaaaaacaaaaccaactcagcactctgtaaaagagttactttcaatcggtattcagccagatattcttatctgtcgtactgagtatgatgttgatgctgacactaaacgtaagatcgcgttattcacgaacgtagaagctcgtgcggttgtcgtgtgtaaagatgcgaaaacgatctatcaaattccacgtggcttctatgagcaaaatgtagatgacctgatttgtgaacgttttggttttactgatttaccggaagctgacttaactgattgggataatgttgtagaagcattacttaacccagaatacacagtacgtgtagcaatggtcggtaagtatgttgaattaccggatgcttataaatctgtaaacgaagcattgttacatgctggtattaaaaatcgcgtaaaagtacaaattgattatgtcaatgctgaagagcttgaaagtcaagatgtttctattttgaaaacagctgatgcgattttagttcctggtggttttggtgagcgtggtactgaaggcaaaatgaaagctattcaatacgcacgtgaaaatagtattcctttcttgggaatctgtttgggtatgcagttggctgttattgaatatgctcgccatgttgcaggtatgccagaagcttcttctacagaatttaaccgttctacaaaatatccattgattggtttaattaccgaatggttagatgagcgcggtgaattacaacagcgtagccttgagtctgacttaggcggaacaatgcgtttaggtgcacaaaaatcagaattggttgaaggcacaaaaactcgtgaagtttacggaaaagctgagattaccgaacgtcatcgtcaccgttatgaaatgaataatcgtttcattgaagcgattgaacaagcgggcatgaagatttctggttattcttcagcgcaacatttagttgaaactgtagaaattcctgaacatccttggtttattgctgtacaattccacccggaatttacaagttcaccacgtgatggacatccattatttgctagttttattgacgctgcaaaaacacagcatcaaaaaagtaagtaatgcgattttaaaataaactgggaaagtttaaatgtcacaattaaaaccacaagaagttgtacgtttaggcgatatacaaatggcaaatcatttgccatttgtattatttggcggaatgaacgtactcgagtcaaaagatttagcttttgaaattgctgaaacttatattgatatttgtaaacgcctagatattccatatgtatttaaggcgagttttgataaagcaaaccgttctagtttgcattcattccgtggtcctggacttgaaaaaggtattgaatggttaggcgacattaaaaaacattttaatgtaccaattattaccgacgttcacgaaccatatcaggcagcgccagttgccgaagtcgctgatattatccagcttcctgctttcttaagccgtcaaactgatcttgttgaagcaatggcgaaaacccaagctattatcaacattaaaaaagcacagttcttggctcctcatgaaatgcgccatattttgcataaatgtttagaagcgggaaatgacaaacttattctttgtgagcgtggctcagcatttggctataacaatttagttgtagacatgcttggctttgacattatgaaagaaatgaatgtacctgtattctttgacgtgactcatgctttacaaactccaggtggtcgttcagattcagctggtggtcgccgtgctcaaattacaacattggcacgtgctggtatggcaacaggtttagcgggattattcctagagtctcatccagatccagacaaagcgaaatgtgatggaccatctgcattgcgcttgtcacagcttgagccattcttggcacaactaaaagaattggatactttagttaaaggattcaaaaagttagatactcattgatgcaggaatttgcatcgcgttattcattcaactgaggaattgttcatgagccaaatcgttgacattcgtgcacgtgaaattttggactctcgtggtaacccaaccatcgaagcagacgtcatcttagaatctggggtggttggtcgtgcatgtgcaccatctggtgcttcaactggttctcgtgaagctttagaacttcgtgacggcgacaaatctcgttacttaggtaaaggcgttcgtactgctgttcagaatgtaaatagctcaattcatgaattgcttgttggtcaaagtgtttttgaacaaaaagcgcttgatgaaaaaatgattgcttttgatggcactgaaaacaaatctaaattaggtgctaatgcaactttggcggtatctttagcagcagctcacgcagcagctgctgaacaaaaacttccattgttccaatacattgctaacttacgtggtcaaactactttgactatgcctgtaccaatgatgaacattttgaacggtggtgctcacgcagataacactgttgatattcaagagttcatgattgagccagttggtttcacttccttcgctgaagcattacgtgctggtgcagaagtattccattctttgaaatcagttcttaagaaacagggtttgaacacagctgtaggtgatgaaggtggttttgcgcctaaccttcgttcaaatgaagaagcgattacagtaattcttcaagcaattgagcaaactggttataaagctggttcagatattatgcttgcacttgactgtgcatcttcagaattctacaagaatggtcaatatattcttgaaggtgaaggcaacaagtcttttacaagcaatcaatttgctgattacttagctggtcttgttaagcagtatccaattatctctattgaagatggtttggatgagtctgactgggaaggctggagttacttaacttcaattcttggtgataaaatccaattagttggtgacgatttattcgtaactaatcctaagattttacaacgtggtattgatgaaaaagttggtaactcaattttgatcaaatataaccagattggtacattgactgaaactttagatgcaatctaccttgctaaagcaaatggttacaccactgttatttctcaccgttctggtgaaacagaagattcaactattgctgatttagcagtaggtacagcagcaggtcaaattaagactggttcactttgccgttctgaccgtgtttctaaatataaccaattgcttcgtattgaagagttaactaaagctgtttaccgcggtaaagctgaattcaaaggtttaaactaatcttttgaataaagctttatatatttaaatattgatgaaaaattaatatctaaatataagtgctatttctaagtgttagaaatagcacttttttatttaccctaagcgccgggtttttaaagattcagcccaactgtggtgatgacaacgagagcattcttgatctagcttatttaaaattttagtttcgccacatttcatacaggaataaaaagtattaattttaagaacttctgctttacgataagcatcagggaataagggaagtccccatttgacatcttcatcttcataataaagcaagctcagaataccatccgattcaagcagggctgttctgacttggcctaaatgttcaacgttttgttggcgcatttccgaaaaaaactcatcatgagaataggtctgtttttggaaatctttgtagactaaaagaccttctttaacgacacagagcgcttttccttctaataagtcttcaatttttttatgttttaccataccccaagtgacaagacgatatagagaaagaatagcgataaaagctatcaatgcatgggcaatcggtaaatccttagtaaacataggatcgccagcagcagaacctaaacataaaataatggcaagttcaaataaggagagttgccgaataccacgtttaccagatagccttagaaaactaatgataatgataaacatgatggtacaacggaccaaaatttctaaaacaaaggaccacgttgtgtcacctataagaatattagaaagatccatctttttctcacttgtttaaatatgtataaaaaatacatttaaaattcatatcagaataaaattaaaaaaatatactttttaagtggttattggttaaaaaattgatatatgtgtattgttatatgaaattaaaagatataaaactcatgtatagaatagaagggccgagcttgaaaaaaatgacgatacaactattaaattttaaaaaaattctgttttattaatttatcatcttgaataaaattccgaccggaatcaagcattgtaagtaatacaatatttaaactttggtcattggtggtaagaagatagtcttcatgttcagagaatctatttctttatatctttcaggagagcttttttatatttattgagacactttttttgttaattagaagtatttttatatgcatagattgatttataagcagttgtgttgataaacattattttcctttccaattgagttgaattttgacaaaatgaaacatgtcacaatggtcaatttaaagtaatatgaccattcatcgttttgcaggaactttgcaggaattttgcatgctgcttgtaaattgtcatacaatacaaaaacttaatcaaagtttttaattaaagctcttaatgctatgttagaagtatttcgttccacttcaagcaaacttatattgctactggttattgttttagtggctatattgcaatatcagttttggttaggtgagggtggttattttcctcatcaagcgcttatgcagcagattcaacaacaagccgaagtaaatgacgagcttaaagagcgaaaccgtattttggcagctgaagttttcgacctaaagaatggtacggaggcgatagaagagcatgctcgcctagatctaggtttggttaagccacatgagacatttgttcaaatgagtacaattagtactcattacaaacctatttatattgacccgaacgctaaagtagatttggaaactaatgagacacctccatcaccagacatcccagactaaattatgggcagttatccctgcggctggttcaggtagtcggttttccaaaactgaattaaagcaataccaatatattcaagatgctactgttatagaacatactgttaagcgtttaagtcagcttccgctgacgggttatgttttggcaattggaaaacaagatacttttgcctcaactttatcttttcaagataagcataaagcgcatttttgtaatggaggcgttgaacgtgtgcactcggtattaaatgctctgaattatctatcacagattgcggatgaggatgattgggtattagtacatgatgcagcaaggccttgtgtgacttttgaatgcttgaatactcttgttaaaaatgcaattgagactaatcagagtgctattttggcaattcctgtacgcgatacgctaaaacaagtgaatcaggaacagcaaattgacaaaactgtaagtcgagagctgttgtggcaagctcaaactcctcaaattgctaaaatcggaattcttaaaaaagcgatagaaacagcgctaaaaaataatttgactattactgatgaggcgagtgcacttgaatctataggagagagtgtactggtggtcatggggcgttctgataatataaaaattacttaccccgatgatttagaacttgctcgcttgattctacaatcacaaaattaagattttattacaggatagatggtaatttttagttataaaatagcctaagtaaatatggtgtttctacatatctattcaaaataattagtatttttttacaacttgtatttgtaagattgaataagtaatttacttagataatgttcgatagtcgaacaaaaaaatcctaaatcgaacaaaactatatatagctgactagatcaaaatctgaaaattatcaaaaatgtttaaaagggaaatctaagggaaacactcgggattgagtgaaatatttatctattcttctcgcctcagtgtgcctaaatctcttacctctctcttcttcaatgagcacaatggagttgtctaatgattgacaaaagtaagtcctcactaagcgaggttttatcgcaaattaaagatggtgcaaccattctgattggtggttttggtaccgcaggacaacccgctgaactcattgacggtctgattgatcttggcgttaaggacctgaccattgtgagcaacaatgccggtaatggcgattatggtctggctaaactgctcaaagccggttctattaaaaaagtgatttgctctttcccacgtcagtctgactcttatgtgtttgatgaactgtaccgtgccggaaaggttgaacttgaactggtaccgcaaggcaatctggcgtgccgtattcaggcagcaggtatgggccttggggcggtgtttaccccaactggctttggaacacttttggccgaaggcaaagaaacccgtcatattgatggtaaagattacgtgcttgagtatccgatcaaggctgactttgccctgattaaagcctataagggcgaccgctggggaaatctggtttaccgtaaatctgcacgtaactttggcccgatcatggccatggctgctgatgtcaccattgctcaggtttctgaagtggttgaattgggtggattagacccggaacacatcatcaccccaggtatttttgtacagcatgttgtacaagtacagcccgcacagtaagcaataaggagaaataacatgagctaccagaaactcagccgtgaccagattgcaaagcgtgtggcacaagatattcccgatggtgcctatgtcaacttgggtattggtttaccgaccaagattgccagctacttacctgctgataaagatgtctttctacattctgaaaatggtctgttggcttttggcccaccaccagcggcaggtgaagaagaccctgaactgattaatgcgggtaaagagtttgtgaccatgcttgaaggcggcagctttttccaccatggcgattcatttgccatgatgcgtggtggtcaccttgatattgcggtgcttggggcatttcaggtggcagccaatggtgacttggccaactggcacacgggtgcaccagatgcaattcctgctgttggtggtgcaatggatttggcagttggtgccaagaaagtatttatcactacagaccatgtgaccaaacaaggtgagccgaagattgtggctgagctgacttatccagttactggtaaacactgtgttgaccgtatttacactgacctgtgcgtgattgacgtgactaaagatggtttaaaggtgattgagaaagttgaaggtcttagctttgatgagttacaggctttaacaggtgcaactttgattgatgcgactcaagggtaaggaagtagggaaatgacattaaaaaacgcttatatcatcgatgccatccgtactccatttggccgttacgccggtggccttgcacctgtccgtgccgatgaccttggcgctgtgccgattaaagcactcatgcagcgtaacccgaatgtagattgggaacaggtcgatgatgtgatctatggttgtgccaaccaagctggtgaagataaccgtaacgtgggccgtatgtcagcattacttgcagggttaccttatcaggtgccggcaaccaccattaaccgtttgtgtggttcttcactcgatgccattgccattgctgcccgtgccattaaagcaggtgaagcgaacttggtgattgcaggtggtgtagaaagcatgagccgtgcaccttatgtgatgggtaagtcagatagtgcttttggccgtagccagaagattgaagacaccaccatgggctggcgtttcattaaccctaaacttaaagaattgtatggtgtagacaccatgccccagactgccgaaaacgtcgctgaacagttcaacgtcaatcgtgcagatcaggaccagtttgccttggtgagccaacaacgcaccgcaagcgcgcaagccaaaggctttttttctaaagaaatcgtggcagttgaaatccctcagcgtaagggtgatgcggtggtgattgataccgatgagcatcctcgtgcatcaaccacccttgaagctttaagcaaacttaaacctgttgtgaaagcagatggcacagtcactgcgggaaatgcttcaggtattaatgatggtgcggcagctctattgattgcttctgatgatgcagttcaggcatacaacttaaaaccacgtgccaagatcattgcttcaacagccgtcggtgtagaaccgcgtattatgggttttgctccggcaccagcgattaaaaaattacttaaacaagccaacctgactttagagcagatggatgtaattgaactgaatgaagcctttgctgcacaggctttagcagtgacccgtgatttaggcttaccagacaactctgacaaggtaaacccaaacggtggtgccattgctttaggtcatccacttggtgcatcaggtgcacgtcttgtgacgacagctttaaaccagcttgaacaaacaggtggccgttatgccttgtgttcaatgtgtattggggtaggtcaaggtatcgcattgattattgagagagtctaatcatgagccagttatatgccagcttgttttaccaaaaagacgtcactgaaatctttagtgattcatctttaatcacctacatgattcaggttgaagttgcgttagcccaagcgcaggcacaagttggcgtgattcctcaaaatgcagcaaataccattgcccaagtagctgaacaggcgttagaaaagtttgacttttcggctttggcggtagcaactggcttagctgggaatatcgcaattccatttgtaaaacagcttacggcaattgttaaagatactgatgaagatgcttcgcgttatgtgcattggggagcaaccagtcaggatattttagacacagcttgtattttgcaatgccgtgatgcgttgaatattgtggaaggtcaacttcaacagtgctacaccacagcattacaccaagctaaacaatatcgccatcaagtcatgattgggcgtacatggttacagcaagctttaccaattaccttagggcataaacttgctcgttgggcttctgcatttaaacgtgatttagaccgtatacaagctatgaaatcacgtgtgctcactgctcagttaggcggtgctgtgggttcattagcttctttgcaagaccaaggttcgcttgtggtcagcgcatttgcgaagcaactgaatctgactgtaccaacaagtacatggcatggtgagcgtgatcgtattgtagaaattgcaagtgtgcttggcatgattgtcgggaatacgggcaagatggcacgggattggtcactcatgatgcaaactgaaattgcagagttgtttgagccaaccgcaaagggtcgtggtggttcatcgaccatgccgcataagcgtaatccagttgcggcagcatccgtattggccgcggcgaatcgtgtaccagcactgatgtctagcatttatcaaagcatggtacaggaacatgaacgtagcttaggtgcatggcatgcagagtggttagcaattccagaaatctttcagctttgtgctggagcattaagccgtactggtgaagttctacaaggttttgaagttaatgctgagcatatgcaacagaaccttgagtgtaccaacgggttaattatggcagaagcggtgatgatggcacttgcacccaagattggacgtttaaatgctcatcatttggttgaagctgcatgtaaaacagcagtagcacaaaaccagcatttgtttgatgttgttagccaactagatgaagtaaaagggcagtttagccaagaagagataaggaatattttcaaaccagaaaactatttaggcaatattcagcaacagattgatgcggttttgaaagaagcacaaggagagtcaaagtgaaacagactattagcaatcgtcaaggaaaacagttagcagtttatacagattgtctaaaagatgctcctgtacttgtgttttctaattcattaggaacagaccatggtatgtggcaatctcagctgaatgaattaaaaagtcattttaatgtcattacatacgacacacgtggtcatggtgaaagtgatgtaattagtgacaccacattgcaaaacttagctgaagatgttgttgatattttagatgccttgaatattgaaaaagctcatttttgcggcatttcaatgggcggaattacagggctgtggttgggtattcatcatccaaatcgttttaatagcattacagttgcgaactcagcagccaaaattggtcaaaccgaggcttggttaagtcgtgctgaatcggtagaaaaaaatggtttagccgagctagttaaaactacccatacccgctggttcagtgaaaaatttgactatcagcataatgtggttgcacagacaacgattcaaagtctcgcaaacacgccagcacaaggttatgccaatgcatgtcgcgctttagcgtatgccgatttgagaaatgaaattgcacaaatccaaattccaacgctactgattgcaggaacagaagatccggtaacgacagtagcagatgccgaatttatgcagaaggcgattaataacagtcagcttgcaaaactcgaagcatcccatctttctaatattgagcaaccacaaagatttactcaggaattgactagatttattcagcaaatctaatcgcttagtaatttaaaaggaattggccttaaggaggcaagtatggcgtctcaggattacgctacaccaagcaaaagcatcgatgctcaagcactgattaatgatgctccacttagtaaatatcaatggatgatcgcaatcatctgtttcttaattatttttactgatggtattgatacagctgcaatgggttttatcgctccagcattggctcaggactggggcgtagatcgctctcagttaggaccagtgatgagtgctgcacttggtggaatgattattggagctttagtttctggcccgacagctgaccgctttggccgcaaaattgttttagccttttcgatgcttgtatttggtgggttcaccttggcatctgcttatgcaaccaacttggatagtcttgtcgttttacggtttttgacaggtattgggcttggcgcagctatgccgaatgcgaccactttattttctgagtactgtccaacccgcattcgctcattactcgtgacatgtatgttctgtggctacaacttgggtatggctacaggtggttttattagcagttggctgatcccgacctacggttggcatagtttatttttgctcggcggctggtcacctttaattttaatgattttagtgattttggtgttacctgagtcttaccgctttttaattgtgaaaggcaagaatccagaaaaagtacgcaaaatcttaaaccatattgcaccagcacagattcaaaatgcgacagcatttcatgtgcctgaagaaaaaacagaagttgttcaaaagaaaaatgtctttggaattatgttttctaagccatatgccaaaggtacggttttgctttgggtgacttacttcatgggactcgtggttgtttacttgctaacaagttggttaccaacacttatgcgtgaaacaggtgcttcgatggagcgcgctgcatttattggcggtttgttccagttcggtggtgtggtgagtgcattgtttattggttgggcaatggacaaattcaacccgaaccgagttatcgccattttctactttgccgcaggtctatttgcaattgctgtcggtcaaagcttaggcaactcaaccttacttgcagtattggtactttgtgcgggtatcgccattaatggtgcgcaatcttcgatgccggcgttaagtgcacgcttctatccaactcagtgccgcgcaactggtgtgtcttggatgacgggtattgggcgttttggtgcggtatttggtgcgtggattggagctgtgttactcggtaatgattggtcgtttaccgccattcttagtttattactcattccagcgaccgctgctgctgttgcggtatttattaaatcaattgttgcgcataccgatgcaacttaatagaggtctatcacaatgaatgatgaacaacgctataaacaaggcattgaggtgcggactgaagttttgggtgaaaaacatgttggtcggtctttgcagaacctaaatgactttaaccaggatttccaaaattttattagccgttatgcatggggtgaagtgtggtctcgcccaggcttaccacgtcatacccgtagtttagtgactatcgcaattttattggcactgggccgcgaagatgaactacgcatgcatttacgtgcttgtttcaacaacggtgtaactaaagaagatttaaaagagctgatcttacacagttcactctatgcgggtttacctgctgcaaacgctgcaatgcatatggctgaagaagtctttaaagagttggggatagaagtaaacccaattgcagcgaaagaacaggattaaggagataaagatgtcacaacatagctggggtgcttacgcccaacgtaatacagatgatcatccaccagcgtatacgccaggttataaaacaagtgtattacgttcgccaaaaaatgcattgatctcaattaatgagactttaacagaagtcactgcgccgcatttttcttcaaatctgtttggcccaaaagataacgatttgattttgaactatgccaaagatggtttgccaattggtgagcgtgtcattgttcatggctatgttcgtgaccaatttggtcgtcctgtaaaaaatgcacttctagaagtatggcaagccaatgcttctggtcgttaccgccatccaaacgataagtttattggtgcaatggaccctaactttggtgggtgtggtcgtaccttaactgatgaaaacggtttttatattttccgtaccattaaaccgggtccatatccatggcgtaaccgtattaatgaatggcgtccagctcatattcatttctctttaattgctgatggttgggcgcagcgtctgatttcgcagttttattttgaaggagatacgctcattgacacttgcccgatcttaaaaacgattccttctgaagatcaacgtcgtgccttgattgcactagaagataaaaataactttatcgaagcagatagccgttgttaccgttttgacatcactttacgtggacgtcgagcgacttacttcgaaaatgatttgacttaatcgggagcacgagcatgaacaactggaattttcaggaattaaaagaaactccatctcaaacaggtggtccttacgttcacattggtttattgccacaacaggccggtattgaagtttttgaaaacaactttaataaccagttggttcaagaccaaaccaaaggtgagcgtattcgtcttgaaggtcaagtgtttgacggattaggtttaccgctacgtgatgtactcattgagatttggcaggccgacgcaaatggtatttatccaagtcaggcagatacgcgtgagcaaaaagctgatccggcatttcaaggttggggccgtacaggtgcagactttgaaacgggtgtttggagctttaatacaattaagccgggcgcgacagcaggccgtaaaggttcaactcaagcacctcatattgcattagtcattttcgctcgcggtattaacttgggtcttcatacacgagtttattttgaagatgaagcagaggcaaatgctaacgatccaattctaaatagcattgaatgggcaccacgtcgccaaacacttattgcgaaacgttttgaagaaaatggtgaagttgtttaccgctttgatattcgtattcaaggcgatgacgaaactgtattttttgatatttaagaaacacctaaggctacacctgattattcaaggatgcgtgtagcctttttaaggatgaacctatgaacatgaaaacattattaagcctaagtttgcttgcactcccattttttactgcacaggtaaatgctgaacctgttgctttagctgctcaggcacaacctgccgctacagccgttaaaacgattgttccgattaccgcaaaaactaaagaacaagcattggcacaagctcaagtcattgcaaatacggcagatgctgatttagcagagttccgtatcgatttattaagctttgccagcgatacaaaacaagtgattgccttgggccatgagttgaaaaagattttaggcaataagccaatgattgccactattcgtacaaaaaacgaagggagtcagcttgaaattagtgatgctgattatggtaagacttatcaggcttatttaaaaaatccgttcatggactggttagatgttgaaatgttccgtgatcaaaaagtagtttcagaaattgttcaaaaagcacatcaaaagaaagtgcttgttgtcatgtctaatcacgacttccaaaaaacaccaagccaagatgaaattgaaaaacgcttgttaaaacaagatcaaatgggcgcagatgttctcaaaattgctgtaatgcctaaatctaaacaagatgtcttcactttaatgaacgcaactttaaaagtaagccagcaaaccactaagccattattgacaatgtcgatggggcaattaggtacgatttctcgtgttgcgactgccaatatgggcggaagttatagctttggcatgattggtcaggcttctgcaccgggtcaaattgatgtgactaagctcaaacagattttacaaaccgttcaaccaacaaacccgtaaatcataaggatatgatgaaatgaatacattacgtttaactactcttgcattaggtttgatggtttcaggcatagctgcggctcaaacttatgtggttgaccgttatcaagacgatagcaataaaggctctttacgctgggcaattgaacaagccaatgcaaacccaagcgaagctagcgaaattttgattcaagcagtaggcaaagcgccttatgcgattaaattaaatagtgcacttcctgaaattaaagcacctgtcaaaatcattggtactcagtgggataaaactggcgaatacatcgcaattgatggttcaaactatattaaaggcgaaggtgcaaaagcttgtccaggtgcaaaccctgagcagtacggcaccaatgtacgtactatgactttaccggggttggtattacgtgacgtcaacaatgtcactttaaaaggtttagacattcatcgtttctgtattggggtattgattaaccgttcaagcaataaccttattcaacacaaccgtattagtaataactatggtggtgctggtgttatgttgacgggtgatgatggtaaaggtaacccaactgcaaccacgactaataacaacaaagtcttagataacattttccaagacaatggtgatggcttagaactgacacgtggtgcagcatttaacttaattgcgaataaccattttgtttcaaccaaagcaaatccagaaccatcacaaggtattgaaattttgtggggtaatgacaatgccgtagttggtaataaattcgaaaactattcagatggcttacagattaactggggcaaacgtaactatatcgcctataacgaaatgaccaataactcgattggtttcaatatgacgggtgatggcaacattcttgatagcaataaagtacatggtaaccgtattggtgtagccattcgctctgaaaaagacgcaaatgcaagaattacattgactaaaaacctgatttgggacaatggtaaagatattaaacgttgtgaagcaggtggttcatgtgtaccagatcagcgtttaggggcaattgtatttggagtacctgcacttgagcatgaagggtttgttggttctcgtggtggtggtgtggtgattgaaccatctaagcttcaaaagacatgtactcagccaaatcaacaggactgtaatgctcagccgaatcagggtattaaagctcctaagttaacagcgaataaaggttcagttacagtagaagttaatggtttaccaaaccagcgctatcaagttgagttttttggcaaccaaaatgcagcatcaaaagaagctgagcaatatttaggaacaataacagtagctacagataccgaaggtaaagcaaaagccaattggaaaccaacagtcaaagttgcctcaattacagcaaatgtgactgatcgcttcggtgctacatctgagctcgggtttgtgcaagttaaataacaaaaaataaggcgcctcaaaacaggggcgcatttcagaaaagacaaaagggacttgaaatgccaaatgtaatgaaactgagtgtgctaacaattgctgtattgggcagccaatttgcacttgcaaatgagccatggtcacaagaccgtcaatggttgctaggcgactggaatggaaaacgccagcaattagagcagcagggctataaatttacggcttctattatgagccaaagtgccacaaatttaaatggtggttacaacgacagcaatacttttgaaaatgctgcacaactttctttaggtgcaaacctagatttagaaaaaattgctggttggaaagatacaacagcgagcctagtcgtgactaaacgtgacggcaatgcattaactcttgagcgtattaaagacccacgttctagccaattgggcaatgctcaagaaatttatggtcgcgggaaaatttggcgtttatcccaagcatgggtgaagaagggctttgttgataatactgtacaggtcaaatttggtcgtatgggaatgtcagaggactttaatagttctcaatgtgagtttcagaacttattgctttgcggtgggcagttaggaaaatcaattggttcaatttggtataactcaccagtcggtgtttgggctacaaacgttaaatatcagtttgcacctgaatggactttaggtgttggtgtgtatgaggtcaatctagacaatattaaaactgaatcaaacagtgatggttttaatctggatatgaataacgtcaagggtgctaccataccagttgaacttgcatggaaaccaaaacttgctgcttttaatggtttaccgggtgaatataaagtaggtgcgctgtactcaaccgcagaagcaaatgatattaaaactgcgggtaaagtgcatgacggaaaacaaagcttctggattaatgcacagcaacaacttagccatgccggccaagatccgaaacgcggtttatatgtcagttttaacagcgttgtaaatgataaagcaacgacttttgttcaaagtacgcaacagcttgctctttggtataagggaccgtttgatagccgtccaaatgattcgattggctttggtattgccaattatgtagtcaatgatcgtgctaaagataaacagatcgcgacaaacgaaagccgcggatactatagctatgatccgattgcatctgactatattccaattcaagacgacgagttaaatgtcgagttgaactatacctatcaatggtctccggccgtcatgttacgtccaaacattcaatatatccatcaacctgctggtgtgaaagaagtcgatgatgcttgggtggcaggcctgagtgtaaaagttaatttttaataatattgatggctggttagacatagtttaactggccaaaatgcttgaactattcgggttcagtatatgtggagtaggatctatgtctgagtcagattctaagtttcatatcttattcaaaatatggtgttttattttaggtttagctttattggctactggtattttttatatcgtgggcggtggaaagctagtatctctcggtggttcctggtatttccttatctcaggactgtttataaccatttcagcaattagtattttccgaaaaaaagcgctgggcgtctggatttttgcggctgtttttgttggtaccgtaatttggtcactcattgatgctggatgggagttttggccgttattctcgcgcttaatgtttcctgctggtctttttgctgcgttgttatttaccttaccttcaattcgacgctaccaatttcaaactagtttggcatcttcagcctatgccgtaggtggcttagttgttgtgggaatgttgattgcgctctatcaaatgttccaaccgcatccaacagtagcaagctcaggtgaaaaactacctttagtaccagttgacccatctaaaaaacaggtgaattgggaaaattatggaaatgatgcgggtggtagtcgctttgttgctctcgatcaaattaaccgagataacgttcataaactaaaagaagcttggcgctttagaacaggtgattttacaacgggtagcggtaatggtgccgaagaccaaatgacgccgctacaagttggaaataaagtctttttatgtacgccacataacaacatttttgcaatagatgccgactcgggcaaacaactctggaaagctgaggtgaactctacagccgatgcttgggaacgctgccgtggtgttgcatacttcgattcaactaaaccactggtgcaaccaactttagctggtgcaactccggtcaatactgttgccagcaacacagcctgtccacgccgtgtatataccaatacgccagatggccgtttaattgcagtcaatgcagataatggtcagcgctgtgcggactttggtgtaaatggaacggttgatctactcgaaggcctaggcggtgggactaaggctccacgttttgaagtgacttctgcaccgactattgctggaacaactattgtggtgggtagccgtattgccgacaacgtggcagcagatatgccgggtggtgtaatacgtggttatgacgtgattacgggtaaacttcgctgggcatttgacccgcgtaatccagatcctaactatgttcttaaaccgggtgaaacctataaacgtagttcggcaaactcttgggctgcaatgtcatatgatccacaaatgaatacagtgttcctaccgatgggtagttcatctgttgacatttggggtggtaaccgtaatccgttagatcacaaatacaatacttctgttttggcacttgatgcgacaacaggtaaagaaaagtgggtatatcaaactgttcataatgacttatgggactttgacttaccaatgcaaccaagtctagtcgactttccattaaaagatggtacgactaagccagctgttgtgattggaaccaaatcaggtcaattctttgtccttgaccgcgtaactggtaaaccgctaactaaagtgattgaacaaccagtgaaagcggcaaatattccgggtgagcaatatagcttaactcaaccgcgttctgttgaaatgcctcaaatcggtaatcagactttaactgagtcagatatgtggggtgcgacgccgtttgaccaactgatgtgtcgtattaactttaagtcaatgcgttacgaaggtttatttaccgcaccgggtactgatgtttcattaagcttccctggttctttaggtggcatgaactggggtagtattgcttttgacccgacacatcgttacatgttcgtaaacgatatgcgtcttggtttatgggttcaactcattaaacaaacacctgaagatattaagattcaggcgagtggtggcgaaaaagtaaatacaggtatgggtgctgtaccaatgaaaggtacaccatataaagtgaataaaaaccgctttatgtccgctttaagtattccttgtcaaaaaccaccgtttggtaccatgacagcaattgacatgaaaactcgtcaggttgcatggcaagtaccacttggtacagttgaggacactggaccacttggtattaagatgggcttgaaagcaccgattggtatgccaactattggtgggccaatggcaactcaaggtggcttagtcttctttgctgcaactcaagattattacttgcgtgcttttgattcatctacaggtaaagagctgtggaagtcacgtatgccagtaggtagtcaaggtacaccaatcagctatgtttcacctaaaacaggtaaacaatatgttgtggttaccgcgggtggtgcacgacagtctccagaccatggtgattatgtgatcgcatatagtttagagaaataatgaaagagggcaaaaggataaattttcttttgcccttatttttttaatatcttttttctattagagtgtttgcgtaaattctgtaattttagtgagatagctttaccaaatagtaaaaaagtgcttgaagttattgctaaacttaaaatattcctataattgattcatcctgaacactagatatagccgaactattaagcatttttttataatgttttacctataaataaaatttcaaaatttattaagttttgtttaacttaaagttgtgaattttaattaaaaataaacattattgagtttttaactctaaaaaacaggttttttttgttggaaaaacgagcgtaaatatatacttatattatatttaaataatgtattgcattaagatagaatggtcggcgcaggttattactacccagtaataatttgtatttcaggaatttaagctttaattggcttaaggctcatctaacgatgggcctttttttatgtgctttatattttaattttcttgataactaaaaatagcctaagtaatagcaaataaactatgaaaaatgagtctttaatgacaatttgcatatgatttgttagattaatgccacttgataataataggtgatgtaatgagatttttagttcttgcaactttatccggtttggctttaatgggttgtgcttctgttcaacaagcacctaatacacaagaaaccattcgttatgcttctagtccatgtttcggcgcatgcccaatttactcagtagaagtaacacctacaggtttaattcgttttgaaggtaagcaatatacaaaagcaattggcgttaaagaaattcaaggtagcgtaaaagattatcaaaagcttgctgatgaattaaaaacttatcgtccgcaaacaggaacccaatctaaaactgcaggttgtcagcaaactgcgaccgatatgcctagctattacatcacctggattcaaccaaatggtacagaaacaaaattaagccattacacaggttgtatctctccagcaaataatagattaaataaagttatggaaaaattacctgaacaattaggcattaaagatctaatttaatgataaaagcctcaaaatcttggggctttttcttgttaagaagaattataaacttaaaagttttatattaagtatttctaaaagaatcagcgtataatacagattataaaaacatatattgttaagagtgcttatatgtcaagtattgtctatgcctttgtgggtggtttattactcggtattgcaacagttgggtatttatatataaatggtcgtatagctggaattagtggtttgcttgctcaattcattagcccatctagagatatatttaaaagttctgcattctggttcatagcaggactcgtgattacacctttcatatatggttatttctatcagcctgaaatcgaaattaaagccaattcatttgtacttattctggcagggttacttgttggttttggtacacgacttggatcaggctgtacaagtgggcatggcatttgtggaatgagcaggctatcaaaacgctcaataatagcgaccgcagtttttatgtttgctggcatgctgactgtttatatcattcgccatgtgctggggtaatcttatgaaaaatatctttgcttttatatttggtggtttgttttcattggggttaatgatttctggtatgtctaaccctgcaaaggttttagggtttctagatatttttgggcaatgggatattagcttaatgtttgtgatgctaggtgctattgctgtggcatttattccgtttcaaagggctattaaaaaaccaaaaaccatttttaatgagcaaattcaattaccaacaaatacacagattgaccaaaggttaattgtgggtgcttttattttcggtataggctggggaatagcaggtatatgtccagcgcccgctttaactcttattggattaggacattttgaagcgctttattttattgtcgcgatgttagtaggaatgtttatttaccgaattttaaataaaggaaattaaagctatgcaacaacctctagtaaaagatttttttgatgaaaataccaatacttttagctatgttgttgcagatttagcgactcgtcaatgcgcaattattgatagtgtgcttgactatgatgctgcttcggccactacaaaaacaactaatgctgatctgatcgtcgattatgtcttggcgcaaaacttcaaagtacaatggattttagaaacccatgtacatgcggaccatatgactgcggctcaatatttaaaatctaaattgggcggtacaattgcgattagtcaaaaaatctcggtagtacaagaaacattttcggctatttataattttgattttaagaaatttaatgaaaatcaaccttttgattatctatttgaagattatgaacatttcaaaataggggaaatagatgcctataacattcctacaccagggcatacacctgcttgcttaagctatgtgattggtgatgctgtttttgtcggggatactttatttatgcccgattatggttcggccagatgcgactttcctaaaggaagtgctgctgcactttatgattcggtacaaaaactttatacacttcccgacgacatgcgtatgttcttatgccatgactataagcctgaaggccgtgacgaatatatctgtcaaacagatataaaaactcaaaagcaaagcaatatccatttaaatcgacgagtttccaaagaatcattcataaaaatgcgtcaagaaagagatgctactttggcaatgccaaaattaattctgccttcaattcaaattaatatgaacggtggaaattttccggaacctgaagcgaatggcatccgctatttaaaaatcccatttaattacttttagaaatagcctaagcaaaaataaaattaatcttatggaaatagcctaagtaatatttagagaacttgtcttaaatcccgcgcagtctcttgcaatagcggcaaaatatgttgaattaaatattcttcagttgttctcatggttggagaaacaatatttaaggcagcaactactttaaagtcttgtccataaatcggtacggcgagcgcatgaacacctaattcatgctcttcacgtgaataacaccaatcttgttctcggatttctttgagtaactctaaaaatttatcattttcgacatgcgtatatttagttaaacgctgaagcggatatttttggagccagtccaattgttcttcttggcttaaatgtgccagtaaaattttacccgccgaggttgcatgagcaggtaagcggttacccaaatgcaaaccatatggatttacgcggtcggtttgttgatgcgcggcactacgggcaatcgtaatggcttcataaccatcaagtaccatcaccgaataaatgagagaggtttggttagttagaagatttaataaaggttgagatacttttggaagctgagctgcacctaaataagctcctgaaaatttgagtactttaggggttaaatagtaatagtggccatctgattcaagataccctaaatattctaaagttaataaatggcgtcttgctgccgctcgggtaagcccagttttttcagcagccatagaaatgtttaaacgatgttgattactactaaagctatctaaaatcgccatgcctttaccgatgccagcaatgtaatcttcatgacgaatcgtttttttgttgtcctgattctggattatccgttcatctttactcattactggtccttgtacgatagaagcttaatagatcaattcgctttactgaaaaagtttaataatttcatgtcgcaaaaattgatgtcttaaattatcccttaaatcttcgtgccaaaacatacccattttaatattggtcatctcaaaaggtagagaatgtaaccgaatctcaggactataagataaatgctgcaaaatcatacggggcatggtaagtattgcgtcggcttgggctcccaaaacttgtaacgccgttgagtagttttgacagcgcataaatacatttcttgaaattttttggtgttggtttaaataaatatcttcaagtaaagcgcccgtacggcgtgatgaaacaccaatgtgccgtccactgatataactagctaaatcgacttctttaagttggctgcaaataacgaactcatctgtgaccaaatgatcaaaggtaatttttggagataagtattgttctagatcaatcacgaaatcgagctgctgtgtcgctaagtctgccataatatgttttcgatctagcttcatactgacaaactgcaaatctaaattaagattttgaaaatgttgagccaatcttggaagaataattggctcaatttcatcatgcacggcgatttttaagctttttaaactggttgggtcgaacacatgtctctgttggctaatattttgaatggttaaaagtgcttgcttaacagttggataaatctgttctgcaaaaggcgttgcagacattttattgcctacacgtataaatacttcatcttctagttgttgacgtaatcgttgcaaagcatgacttgctgccgattgcgtaatattgagactacttgccgcatttgaaatacttttttgctcataaatcgcgataaaaagcggatataaattaatatcaattcggtgaaaaaaacttaagtctagaccatgtaggttatgaatattattcatgatgcattatttaataaaatcatttcattcatattaagtttcaagttatgttgatgtaaagaccagataatgatgtaaaggaaaaagaatgtttgaactctcaaaaaaagctcaggattttgctgagcgaactaaaaaatttattcaagaagaaatagaacctgtcgaagcaaaattttgggaagaagttcatgagttaaatccagatggaaactggaaaaaatggcagtggcccgagcttttagaaactctaaaatctaaagctaaacaggcaggcctttggaatatgtttttacccgatgaaaagctaggtgcagggttatcagttcaagaatatgcacatattgctgaattgactggtcgtagtttattggcgcccacggtttttaactgtaatgcaccagatacgggaaatatggaagtgttatggcgctatggcagtgaacagcaaaaacaacaatggttagagcctttattggatggaaaaattcgctctgttttttgcatgactgaaccagatgttgcatcaagtgatgccaccaatatgcaagcgaccgcactcattgacggtaatgaaattgttttaaatggcaaaaaatggtggtcgtctggtttaggtgacccaaatgctaaagtcattatttttatggcccatactccagatgaaactaaagaccgccattatcaacactctatggttttagtaccgattgatacggcgggtgtagaaattcaacggatgttacctgtgtttggtgactatgatgcgccacatggacacggtgaggttcactttaataatgttcgagtgcctattgaaaactttattggtggagcgggtcaaggttttgaaattgcacaaggtcgtttagggccggggcgtattcatcattgtatgcgctgtatcggagctgctgaaaaagcactagagcttatgattgatagaggcatgtctagaacggcgtttggcaaagaaattctaaaactcggcggaaacctagagcgtgtagccgatgcgcgggtagccatagatcaagccagacttttaaccttgtatgctgcttataaaatggatactttaggaaatatggccgctttaacagaaatatctgcaattaaagtggtcgctccaagcgtattagaaaaagtagtcgatatggcgattcagctacatggcggtgcgggcgtttcaagagatacaccattaacaggtttctttgctcaagcacgcagtttacgtttagctgatggtccagatgaagtacataaaggcatgattgccaaattagagttggccaaacgtggttatggtcgtcataagaaagtataagtttaaaggaagtgaatatgtcggtaattgatgtaggcggtgaagtacgtgaaggtgaagagcttgatattggggcagttgagaactggttaaaaaaccaaggtgttgagttggttggtccagcagtcgttactcaatatacgggcggggcgtcgaattggacttatcgtttaaaatatgaaaataccgatttaattttgcgacgtcccccaaaaggaacaaaagcgaagtcagcccacgatatggcccgtgaatatatggtgcagaaaaatcttgccccttattatccagtgcttcctaaaatggttgcactttgtcaggatgaatcggtcattggctgtgatttttatgtcatggaacgcattgaaggcattattcctcgtgcaaaattaccgcctgagcttggttttaatgaagatgatgttcatgagctttgtgtaaacgttattgataagttgatcgagctacatcaagttccttatgagaacacgcctttagctgaactaggtaaaggtacaggatattgccgtagacaagttgaaggttgggataaacgctatgaaaaagtccgcacaatcaacgttccttcatttaaatatgttcgaaaatggctaaacgataatatccctcaagattctacaacttgtattattcacaatgattggcgttttgataacgtgattttagatccagaacatccaactgaagtgattggagtgctggattgggaaatggcgactttgggtgatcctttaatggatttaggtagtgctttggcctattgggttgagcctacggataatatgatttttagatcgacacgtcgtcagcctactcacttaaagggaatgttctctcgcaaagaagttgttgactattatttgcaaaaaactggtctggagcctcaaaactggactttttatgaagtgtttggtgtattccgtttagcagtgattgcccagcaaatctattaccgttattaccataaacaaacaagaaaccctgcttttaaagatttctggatagtgattcatgcactacatatcagagctttaaaacttatcgcccagcaaaaattgcaagaatcggaatttgctcagcaatctctacagaaaatacagggtattttaagaagatgaccacaatttatctggtaagacatggtcaggcatcatttggtaaaagtaattatgatgagttgtctgaaaatggtgaagctcaggcgactttgttaggccaatattttaagcaaatattgaaagaacaaccttatgtggttgcaggaaccatgcagcgccacgagcaaactgcaaagctcgcactcaatgaatgctttccagatgcggtgattcatcataataatttatggaatgagtttaatcatcagcaggtttttgcccgttatgagccgcgttttgaacagcctgaactgttaaaagccgatgtcgcaaaagagcataaccctcgcgcgtatcttgccaaaatctttgaaggtgcgattgaacgatggaccgacggcgattttcatcatgaatatgatgagtcttggccacactttaaagaaagagtcgaaacggcactacagcaactttgtgatgagttagcaaaaaacaaacctcgttatgcagtcgtttttacctcgggtggtgtgatttcggtagcaattggcaagctgcttgaactgagccctaatcgaacttttgctttgaattgggcaattaccaatacaagcctcacgactttacgtttagttggaaatgaagctcaggttttaagtttaaatgaacaccattttataaaagctgaacgtcccgatttactgacatggatttaaaataaggataaaagcatggcaaagacaattttaattacaggtgcaagttctggtttaggcgcaggtatggcgcatgaatttgcagcgaaaggttataacttggcgatttgtgcacgccgtttagaccgattagagactttaaaaaccgaactagaaaatcagtacggtattaaggtgattgcaaaaagtctggacgttaccaattacgatcaggtttttgaagtttttcgtgcctttaaacaagaatttggctatttagaccgtattattgtaaatgccggagtcggaaatggtcgccgtattggtaaaggtaattttgaaattaacagagctacggccgaaacaaactttatctctgctttagcacagtgtgaggcagcgattgaaatttttagagcgcaaaatgcaggtcatttggtggtgatgtcatccatgagtgcgatgcgtgggttaccaaaacatttatcgacctatgcggcgagtaaagctgcagttgctcacttggccgagggtattcgtgctgaattactagatactccaattaaagtctcaaccattttcccaggttacatccgaactgaaatgaatgaaggtgctaaacatctaccttttgaagtcgacgccaaaacagggtgtaaagctttagtcaaagcgatcgaaaaacaacctgtaaaagcttatgtaccgcagtggccgtggttaccaatgagtattgccatgaaggttttacctttgagattggttaataaattaggataaaaaattaccccctaaaattagggggtaatttttatttagaattttttggtgtaattgacgaataaacggtcttcgccaaagtcattgccgtgtttaacgttgtagtcaatacgaatatattgcagggcaaagccttttaagagcggctgctgaaatgtatagtttaaaatcacattagactcagtttcgtggtttttctcaccattagctgctttaaagtcatgaccgtaaacatatttcaccattgcgtttaagcccggaacgtaatctttaaagtcatagccatacatgacatggtaggacttttcatcttctttgaaaaagcctgtggcattccagttaatgaaataagtttctggtaagaagccatctggtagcgggtaagccgactcaccaataatttgttggtaacccaaaccaaaggtatggttttttattttaactgtttcaagtaaaccaatgttctgggcatcaatatcaaaggtattgccgtcatctttcgcattaaagtatttaaatttggaggtcagggcaaaagttggttgtttccacgtatgctcaagccctacatagtgtttattgtagagatcttctaaattaccaaaatagtattcgcccttcaaagacggcgtaaactgatagcgcaggtcaatataatttaagccatcagattctttggtcattccatttgctgtgaacgaaaactttttaaaatcttcttcatttcgtggcgagactttttccacacggccaatttctgcgtaaagttgatctgaaagttgtgatttaagattggttccccaatacgaggtgagtaactggcggctagcatcaaccgccgttacaggtaaatctagccagagttcaccaacacttaaaagtgttttgtcataacctatttttaaagtcgcgccgtattttagatagtcagatgcttgagattgcgtttctttattaaaaggcaaaacagtatctgcgacatgtttgtctgaactcaaacgtacggcgtattgaacggaagcgtcagctccaatcgtaataggtttatctgctatgactagtggagtgtcatgcattttcgatttataaaataaagatgctgcctgagaccaactaccggtatctttaaggacgtcattatcaaaatcacgattgatataggcattttttaaagtgaatttccactcatcttcagtttgctgatttggatttgcagcccaagaactgctgcacataataaataaagtggcaacagctaaagtgtgtggtttaaaacggtgaaataattccataatccatttccaagatatatgccagtcctcggcattacgtattgtgaaatattggtgtggtgttccctaaattgtttaaagggaactcctgtttttataagtggctgttgcttcaattaatgtaatttttcaagcttcatgctttcactaaaggatttacagcctttaaaaagtagagccaaagccagtacacaggacaaaccacccacaatagataaagaagaacccaccattaatggattgccaaaaaacttatctgtaataattgcgactaatgttgtaccaacacctagtccaattaagttacttaccaaaaggaatagggcagaaaggcgtgctctaaattggttcggtgctaacatttgcaatgctgttgctgaaatcacaagtgggaaggaggcaaagaacattgcaggaatgagcaaagttactgaaagccagagttgatctgtttgggtaaaaaatgcaattggaataatcaggccaacaataccaatcacacccgtgaacatcggtgcatcttggcgtccttttttaataaaccagtcgtttagccatcctgcacaaaacacgcctaaagtatttgcaactagcaatatagtgccgagcatatagcctgtttcagtcggcgcgagttgaaacttacgaatataaaatgctggtgtccaactagtcagactgtagagtgccattgcataaaaggtaaaacctaaatagtgacaagcaaatgtttttgcatgtttcttgataaactgaaggcactgcgtgaatttaacttggtcaacttgtccgctttggttgagctgctgtcctttacgtgcaggatctttaactgtcaaaataaatagcaaaccaataataatgccgggtaaccccaccactaaaaaggcaatttgccatgccttgagtgcacctaataaaggaacttcaatgagtgtcacgcctttaagcaggttaatcacgtaaccgccaactaaaaaggcgatacctccacctaagaaagcaccaattgaatagatcccgaccgcgcggcctagtttgtctttactgaacatgtcactaaacattgaataggccgctggagataaagctgcttcaccaacgcccacagccatacggcttaggaatagttgaataaagtttttacttaaaccgcaagttgctgttgctaagctccagacaataatcccgattgaaatcagttttggtcgggaaaaacggtcggcaatataggctaatggtaagcccatcacagcgtagaatagtgaaaaggcaaggccatgtaacaagctaaattgagtatctgaaagttgaaggtctgctttgatgggttcaatcatcaacgctagaatttgacggtcaataaatgaaaaaatataggccaacatacaaagtatgaccacataccatgcatatgcattggttttcttttgtgtcctttcaacagcgatattactttggttcatacacttaatccttatgtataaaacgctttaaagaaattgatctctagcttctattcatcctcaaaatttttgatacgtccccatttgaaatgaataatgaaacggctagaaatgattgaatttggtttggtaaggggccttggagaaggtgacttaacacaaacggaaatagtaatgctgactaaattattgaattattattttctttttatatgtaaaattccattacttattgagtatgtttagatacctaaaaagtatgttaagtgagctattgggagggtttaactgttataaatatttgaatttaataaattttattatttatattggattttttatagtgagcagctaaagaaagactagctttaactgctctagagccaagttaatttagtgtcgatggaaataattaacttgatggcatgagatcaaataatttttttaactgatgatttagattatgcagttcatcttctgaaaaagcattgaggatccccgctaaggtaaccacactaatttggttaatctgttcaaccagctcaacacctttggccgttaatttcaccatcgaaatccgttcatcagcggtagaagagtagacttccacaattccatcttctaccaaacgatatacagcctttgttgctgtggtgagttttaaagtagaaagattggcaatgtcagtgatactggcttccccaagcgcattagtgcttaaaataattttgcggcgagtattatcaatgccaagtttctttatagatttttcaataagttgtgaatatttaccattaacttgggaaatccaaaaaaaggggaagttttgaatactcgacggttctttattgggaagaaattgttctaaatgatcaagcatagctaagcaataacttagtaaaaaaagggtaattctattataaacaaaattttgcatatttccttgaacacacattagaaaaattacttgacaattccattaaattttctgatattttaattaatggataaaaatacatggaaaagtgaatgaatattattagccaaagtgtgcaaaaaggaagcggcaaacttaaggtgatggtgaaggacacaattgatattcaaggactaaaaaccattgctggcagtaaagctttattagaagttgaacctgcgcacgatgatgcagaggtggttaaaaacatcttaaaagctgattgcgaaattattggcaagacaaatttgcacgaattggcttttggaattacgggcattaaccatgcttttggtacacctatcaatcctaaatatcctgaacttattccgggcggctcttcaagtggttcagccgcggcagttgcagcaaaacaagctgactttactctaggcaccgacacgggcggctctatccgtatgcccgctgcgtgctgcggagtttttggtttaaaaccgacttttggtcgggtaagtcgcgaaggcgtatacccgccgtcaagttctttggattgcgttggtccttttgcaaattcagtcgagatgattgaaaaagctatgcaaattattgatccaacttttaagccggctgaatgcactcgtacaccaaaacttgcgctgctcaatgtcaaagcagatgaggttgtttggaactgtatttatcaagcacttcaaaaagcgaatttagagaccgttttagaaaaagttgaacattttgaagcagcttatgatgcaggcatgcagattattaactatgaaaactggcaagcttttggtgagttaacccaaacaggcttaattggttctgatgtaaataatcgtttattaaaagcagcccaaaccactttagagcaagtaaaacaagcagaagttgtgaaagcacaactgacagaggaactcgatgctttattagaaaaatatgacgcattggttctgccgacacttccacaaattccaccaaaagtttctgaagctgaaaacacggtcgcttttttgaacctaaccggtttagttcgaccatttaatttatcaggccatccagctatttcagtgccacttgaaaccagtgaaggtttgcctgtgggcttacagatcgtatcaaagcatcaaaaagatgagcaattatgtgcaatagctaaattttgtgttgatgcaatgcaataaattacaaggagttagatgatgaataagttgtctaaaatggagtttgcttctcaagacaaagcagttgacttagatgctttgtgccaagaaattcgtgagcgtgcctgtgcaggtgaatttgataatcaggcctatgtgagccaagacattatcgaaaaacttaaaaaaattggtgtttatcgtgccttagtgcctaaacgttttggtggtgaagaatggtcaccgcggcagttttgtgagttgatcgaaactttatctaaagctgacggttcagtgggttgggtggcaagtttcggtatgagccccgcgtatttaggaagtttgccggaagaaacgcttaaagagttataccaaaacgggccagatgtcgtatttgccggaggtatttttccgccgcagcctgccgaaattaccgatgaaggtgtggtggtgcgcggacgctggaaattctcaagtggttgtatgggcgctgacattgttggcgtgggaatttcaccccttaaaaataatgaaatgcaaggtttaccacgcatggcagtgatgcctgccaacaaagccaaaatcgaaatgacatgggacactgttggcctaaaaggtaccggaagccatgatttggtggttgaagatgtattggtcgaaaagaaatggacctttgtacgtggcgaaccttcaaaactcagcgagccattttttaaatatccatcactgtctttagcgactcaagtattaaccgtggtgggtattggggttgcagctgccgcattagaagaatttgaaaaattagcaccgggtaaagcatctattacgggtggatcagaaattgcaaaccgcccagtgactcaatatgagtttgctcaagctgatgcagagtttcaggcggcaaagtcttggttttatcaaaccatggatattgtgtggaatgagattattgctggtcgtgaagcaactgctgaacaaattagtgatatgcgtttggcatgtacccatgcagcgcgagtttgcgccaaagtcacccgaaaaatgcaaatgcttgcgggtatgacagcgatttataccaacaatccatttagccgttttgtaaatgacaccaacgtggtgacccaacatgcctttatgggtgatgcaactttacaaaatgcaggtttagtcagtttcggattaaagccaaccccaggttatctataagtttaaattttgaaaaaggaatattgagatggaagctaaaaaaccattacgcgtgttgttttgcatgggtattaaccagaacttttttgatgcagaacctgctgaagcaaaagcggtttgggcagcatttggtgaaatgtggaatggcattcatgacctacctggtgtgcatgtttttgggaatcttgatgatgaccaaagcatggtgggtgcaagtacgggctggccttggaccacttatttgcttgcagatgttccggatattgagacagtacatgcagcttgtaacttgtttagaacgaccgtggtgggtgaagggccatacaaactttggaaatattgcaaagttgaagctcgtgttgggcgtgaattgattattcaacgttagggcgaccgcaatgactgacaaagtgaatattgcagaaattatagaacggctagaacggttggaagcacacaatgctatccgtaactgcataaatcgttatatggaaatctgcgacgagctcaatgcaaatacagatctttatgagttgatgaatctttttgatcaagactgtatttgggaaggtattggcgataaatattccaaatcttttggtcgttatgattcttggcagtcgatttatgacatgttcaaacgctatacacaaaaagaatctcactttgtcatgaatgcacactttgtaaattcagaacaaatttatgtaaatcaaaatgatgcaaatgctttatggctgatgttgcaaacctcaacttttcaagatggccgtagtcatctaaatgcagcaaagctcaaggtgaagtttcagaagcaagcagatggaacatggaaaattaaacatttccaaacacagaatattttcagtcgtccggtatcgcattggcacagtgaagccgagttgccggtaccttcccaggaatgacccaggacatatttaaaaggactattgatatgaacagtattatcccaacgcataacattggcattgattacgatgctttagttaaaagtgaccgtgcccatacttctctttataaagatgaacgcatttttgatgaagaaatggaaaaaatcttttatagcacttgggtgtgggttgcgcatgctagcgaaattccagaagccggaagctataaaaccattaatatcggtaaacagcctgttgtagtggtgcgtgaccgtaaaaagaaagtccatgtacttttaaaccgttgccgtcaccgcgcagcaaccgtatgtgaacataaaaaaggaaaaactaacagttttgtatgcccgtaccacggttggagctatgcacttgatggcagtttacgtggtgtgccatctccggaaagttacggcgattgtttagataagtcagaattaccgctggtgagtctacgggtagaagaatataacggcatgatcttcgcttcatttaaagaagacattcaaccgcttgaagagtttcttgggcctgcgaaaaaatggattgacctgtttatgaaacaaggcgcaggttatccaattaaagtgttgggtgaacaccgtttccgtttcccgggtaactggaaaatccagcttgaaaataccaccgatgcatatcacttcccgttggtacataagtcattcttaagttctgtagatgaaaaaaccgaagaactctttaacttcgaaaaccagccgggctttgttgaagacttaggtaatggtcacagtgtcatggtgatgattcctgaactggtcaatttagaagaagacttaatggagcgaccaattcaagagcgtttcgaagacttggctcaagctttgcgtgacgaagggcatgaagagttagaagtacgccgtattgttcgagcagtgggtggttctggctttaacttaaatttatttccgaatattgcatgctcaatggcgttcttccgtgtgttacagccaatttcagttgctgaaacagaaattcatcactcggtgattaccatggacggcggtccacaaattgccaatcaatatcgcttacgtttgcatgaacatttccaaggcccatttggttttggtacgccagatgactctgaagcttgggaacgcgtgcaacacggtgccaatgcgggtaatgatttatggatcatgttgaaccgcggtttaccgggcgaagtcaaaaccgaagatggcttaaaaagtgatgtcagtgctgaaacaggtatgcgtgcagcatatcagcagtggaaaaagatgatgacagcttaaggagagagcaatgaatatgaatctgcaattattaaatgaagtcactgctttcatctgggctgaagcagatatgttagaccacagtgaataccgtgaatggctcaatttatggaatgaaaagggcatttatatcattccgattgacccgaatctcacagactacgaaaacaacttaaattatgcctatgacgataatcatatgcgtaagttacgggtagagcgtcttgaaaatggtgaggcaatttctacggcaccaaaggcgaatacggtacgcagcatttcgcgagtacgagtgattcaagatcaagatgatgaaatcgttttacgctgtgctcaaaatttacgtgaattccgtaaagaaaacctcaagcattacacggcagatattacgtaccatctaacccgtgatgccgatactggctttaagattaaccgtaaaatcatcaacttggttaactcaaccgataccttggctggtattagctacattctttaggagcggtaacatgaaacaggttgttttagtgacaggtgctgcttctggactcggtaatgtgattgctgaatattttgcgagccaaggtcatcaagtgattttgtcagccagtacgcttgaaaaagccgaaaatgctaaggcacaaagtcagtatgcccaaaatatatttcctttaaagctggatatttcggtcgaggcagattttcatgcagcggtgcaatggattgaagagaaattttctaaacttgatgtgttaattaacaatgccaccgtcaccaaagcaacgcctgtattagaaattaccgcagccgattttgattgggtgacccaagttaaccaacgcggcacctttcaggcttgtcaaattattggtcaatacatggccaaaaaaggttatggacgcatcattaatatggcgtctttagcgggacaaaacggcggtactgcaacgggtgcacactacgcggcaaccaaaggggccattgtgacgttaaccaaaatttttgccaaagagtttgcggcaaaaggtgttacggtcaatgcgattgcaccgggaccgatggagtcaccgatcgttcatagtgtggtgccagacgaaaaaatggaacagttcatccagaatattccggttaaagccttaggaagtatgcattttattgctgaaacttgtgggttgcttgcgagtccaaatgcgagttttgtgactggtgcaacatgggatattaacggtggtttattcatgcgctaagccacaagcttaggcatgaaaagggagttaaatcatgactacactttatgatgttgtcgttaaaaatcgccatgtggaaggtggaaatattgcagttatggagtttgaatctgcaacttctgctgcattaccaaaggttgaacccggtgcacatattgatgtgcacttaccgaatggtatggtgcgccaatattcgctttgccaaaatccaaatgacgaaggaaagtttcgccttggaatcttacgtgaccctgaatcacgtggtggctcgatttctgcatttgatgaaattaaagatgggatgcaaattcaggtcagtgagccgaaaaacttattcccacttttaaaagccaagcacagtgtgttgattggcggtggaatcgggattacgccgttaattacgatggcatatcaacttgcacatgaaggtgcatcatttgagcttcactactgtggtgctagccctgaaaaatgtgcttttgttgatgaaattaaaaatggtgtgttagcacaatacacaactttccattttaaatccgaaggtgcaagtcacagagcattttttgaatctgccattaaagatattgatcctgaaagtcatatttatacctgtggtccagtcggtttcatggattgggtgattaatctcgccacaactcacgattttcctgagcagcaaatccacaaagagtatttccaagtcgaaactgacacctcgggagattcatttgaggtggtggctgagcgtagcggaaaaatcattatggtcgaagctggcgaaaccattttgcaggctttggctaaagaaggcatcgagattgagatgtcttgcgagcaaggcgtatgtggaacctgcatgtgcgatgtgattgaaggcgaacctgatcatcgagatgtttattttactgacgaagaaaaggccagcaatgagcaaatattagtgtgctgttcacgctctaaaacaccgagattagttttagatatctaatgctctcgcgatttatatggatgtaagagaaggtttaggagaaagatgatgaatgtattacaacaaatagatgagtttacggtcgatccactacagtttcgacgagcattaggaaattttgcaacaggcgttaccattgtgactgcacaaaatgcacaaggtgagaaagtcggtgtaaccgcaaatagttttaactcggtatcactcgatccaccacttattttgtggagcattgataaaaagtcttcaagcttttccgtgtttgaagaagcgacacattttgcagtcaatattttatcgggtacgcaaattgagctgtctaataggttttcgagacgcaatattgataaatttaccgacaccaattttcaacttggcgcaggacgcgcacctattttagaaaattgttctgcggtgtttgagtgcgaacgttatcaagtgatcgaagggggtgaccactggattattattggtaaagtggttcgtttccatgaccaaggccgaagcccgctggtttaccatcaaggtgcatattcttgtgtcatgccgcatccaagccttcaagttaagcaaactgaacagagcagcgtagaccaaacacattatgggcacttatataataatgtctgctacttaatgagtcgtgcttttaaagcttatcaaaccgactatattcctaagcaaatggcttcgggtttccggacaagtgaatcacgtcttttgctcgttttggccagtggtactgcctcaagtaaagaagatttaccgcgagatattgctatgccaatgcaagaagttgaaaggtcggctgaaattctaaaatttgaaggattattggtcgatcacgataatttgtacgccctgaccgagaaaggcaaacaaacggcgcagtatttatttgatattgccgatagccatcaaaatgaggtgtttaaaaaatattctgatgagcaaaaggatatttttattaccatgctgcgagattttgcgggagtagcataagccccattaagctgataaattgaattgatttatcagcttctttacatctagctgactatcatcaaaacaattccacggataaggaatttttggcacacaatttgtttatcaataaaacatgattgcaaatatgccaagacagtgcaccaccacaagcgcaaaatcttgagcggtggcacatgtatagagaggtaagggatgaaccaatatgtaagtgatgcattactcacatggacgcaccatattaaaaatgtgtgcggcaattttgaaaccgattttgatggaacccgtaatttattcattggtgaggttcagtgctttttattgggcgataccgaaattgcttttattaaaaataatgccaataaaattgtccgaaaagccgatgaaattgatcgagtaaataatcgtttttgttttttgattttgcagtattcgggaaaaatgctgctcgagtataagaatgagactctaagtctgaatgaaggcgatattgtgttggtagacccggtcgaaactatttcgatgtatccgcaaggtttggtgagtcagatttcagtgcacctgtcgcgtgaaaaattacttaaagaaaatattagtaccgaatattttggaaaactgattacgcaaaatatgagtggttttttactcaagaatattttgaaaaatatgtctgctgaaaacatcaaactttggtatgcaacggaagatggtaatgcttttgaagatgcgctgattgctttaatcaaacccacaatcaattataaaaatattaatagcccaaataatctaatggaaaaagccgagcgctatatcatagaaaacttagcaaaaccagatttaacacctaaattaattgcagagcatattggggtatctctacgtcatctctaccgtttgttccttcaagaaaatttatctattaacaaatatatacagctcaaacgcctagaaaaagtcaaggcagatttactcgataaaagaaacaaacaaagctcgattacccaaattgccttgaagtggggtttttgggacggtgctcatttttcaaagatctttaaaaagacctatggtatctctcctaaagaatttagagagggtatgtcagtttaaattttcatctctcaatgtcatttttagacaaattcgacgtcattcttgaacaagctagccctatgtaactgtgttgaaattaaattcattagagcaggttagataagcttaataaccataaaactattaagttggtctaatgaatttcactcacaggaaagtgcattttaactgtctgattcagatagttcagggatagatgaaaaggatgaaaccaatgcgtaaacaacgattattgaatgacatacaaaaaatactggcacttaacttatcaatcgctgcaagcttttggggacttaatactcaagcgtttgcgcatggtggaaaggccgaaatggtctcactttatcaaaacatgagtgagcaaggcgctaaagttgtcaaagacgattttaccaatacttatatgatcaccaaaggttctatggtagttcgggccaaacccaattcagatcaggttttggtgaatggcaagcctttcaaactcagcgtgcctttattaattaaggatggtaagcctgttattggaaaagatttttttaatgaagtcttccagtcggggttagatcaaactttcaaaattgaaaatacctttcacccgctcaatagcttaaattctgacgaaatcaaaaagacctttgatgtgattaatcgctcgaaatacgcctataaaaatatgcgttttgccgagttaaagcttaaagaacctgaaaaagccaaagtatgggattactttattaatcataaagattttaaagaagatcgtattgcctcatttattttattaaagggcaatcaagcgattgaaggtgaagttaatcttaatactcaacaagtcacaaaatggaatgtacttaaagatactcacggtatggtgctgctagataattttgaagctgtacaacgtgtaattgagacaagtaaagaatatcaagatgcgttacgcaaacgtggcattactgatgtgaagaaagtgattgctactccgctaactgttggatattttggcggtaaagatggtctggataaacaactcaatatattaaaagtcgttgcttacctcgatgtaggagatgggaactactgggcacatcctattgagaacctagttgctgtagtcgatttagataaagaaaaaattatcaagattgaagaaggcgcaatcattcctgtgccaatggcaaatcgaccttatatgtcgaataagcccgtagcaagtaagctaaaaccactcaatattattgaacctgagggtaagaactttagtattactggccaaaccatacattggggcaactggtgtttgcatgtggcgttagattctcgtgtcggcttgcagctttcaactgtgacttataaagataagggcgtaaagcgtaaagtcatgtatgaagggaacttgggtggaatggtagttccatacggtgaccctgatattggttggtacttcaaatcttatttggactctggcgaatatgggatgggaacacttacctcatctattcttccgggaacagatgcacccgacaatgcagttttacttgatgccgtgattgcagactataaaggccagccacaagtgattccaaatgccattgctgtgtttgaacgttatgcaggacctgaatataaacatcacgaaatttttggcaatcaggatgccagtgaagcacgccgtgaacttgtcgtgcgctggattagtacagttggaaactacgattacatgtttgactgggtattttcccaaaatggtgtaattggaattaatgcgggtgcaacgggtattgaagctgttaaaggtgttaaagcacgcaccatgcatgacagtactgccaaagaagacaccaaatatggaactttaattgaccataatattgtgggtacaacgcatcagcacatctataacttccgcttagacatggatgtagatggggaaaacaacagctttatgcatatggacccagtggtgaaagccaatgacaaaggcggtgttcgtacaagctcaatgcaaattgatagtaaagtcattacgaatgagcaaaatgcggctgaaaaatttgacccatctacgattcgcttactcacgaatttcaacaaggaaaataaattaggtaatccagtttcttaccaattaattccatttgcaggtggaacacaccctgtggcaaaaggagccaatttttctaaagatgaatggttatttaaacgtttgaactttatggataagcaaatttgggtgactcaatacaatccagatgaacgctatcctgaagggaaatattcaaaccgttcgactcatgacacagggttaggacaattcattggcaacaatgaaaatattgaaaataaagaccttgtggtgtggatgacaacaggcacaacccatgtggcacgtgctgaagaatggccaattatgccgacagaatgggtttataccctaatcaaaccttggaacttctttgacaacaccccgactttaaacttgggtgaagaagagcaaagcacgcagcacgaccatcactaaagaccaacatgacgaggatgggtaacgaataaattacccatatctgagcacggttaggccgttcgcaaaaaggaatttctcaatgaaaaatttattttctcaggttatgagagggactttctttgtctcatttttttcaactgtgcatgctagtgagctagaaattaagccaacatttgaagcaacttttggagcttttagtagtggtaaaagctataacggcgaaaacctacatgatgaaagaatcaattggcaagaaggccatcttaaatatggtgctaaaggacaatacacctttaaaagcaatcagctctatgcaagtttgagtggtattagttcggccacatttggtgatggtgacgcaggccaaaacagtaatggcaaagaacgtaaaacagatgtgaatgaatgggtcattggttttaaagacggtactaataaagatgagttgaagacttatgatttaagtattggccggcaaaatatcatgattggtgatgggttctttattgcgggtgatgcattaaaccttggaaaagcgcctgcggatggcacactagatcggggcggcgcatattatctggcagctcgtcgaagctttgattttacaagtttgcttcaatataaaccgcaagagaatacaacgctaaagctggcttatttaaagtcagacaataaagcacaattttcacctgaactatttgtgactgatctgatgtatcagcttaaagataagggcgttgggtttacctatttaaacgtattagatcttacagatgctgaacacgtttcagggcgcgaagatcttaaaaattatgctttacgtttgaattatcaacctttaccagaactgcaagttaaaactgagtttgtagttcaagataaaaaagatggccaagaaaatgctggctacttagcgctgaactataactttttatcttcaaaatatacgccttcattaggctaccgttttagtcatttttcagaccaatatgaccctatgttttatggaaatacggtcgggttcggtacgtggtttcagggggaggttgccggaaactatgctggtccattcaataaaaatgcagatattcatcaagtctcttacatgatgaatttgaaagaaaattttatgttgggtgctttggcttataagttcaaaacagtaaataagtccttagccaatgtggatggacatgagctggatgtattctcggtttggtcggtcaataaaaaattcaacgttattcctttagtgggactttataaaccaaaacacgatatccatagtggcggtactcaaaactacgatgacaaaaccaatgtctatgcgcagttaattttgcaatacatctattaatagatcctttaaatgaattgagagaaataaaatgagtgaagttcagattttacaaagcgtgcagcaatttatggcacgtcaacatggacattttattgatggaaagttagttgctgccgagcttttagataaagtggatattgttaatccgtcgactgaacaagtggttgctcaaattagtattggtagtcaacaagatgtcgcaagcgccgttaagagtgctgaacatgcttttcaaaatgcttgggctgaaactacgccgtatgaacgtggcgttaaactaaataagttggcagatttaattgaacaacatggtgaagaacttgcacagctcgagacgttgtctacaggaaagcttatcaatatttcccgtcatcttgaagttgcacaatccgttattttcttaagatattttgcgggttgggcaactaaaattaatggtcaaaccattcaaccctctattccttctatgcaaggagaaaaatatacggcctttactttaagacaaccaattggcgtggttgcagggattgtgccttggaatttctcactcatgattggcgtttggaaaatcggttcagctttgacaactggctgtaccattgtgcttaaaccaagtgagtttgccagcttatctttattacgtttagctgaacttgcgattgaggcaggtattccagcgggtgtaattaacgtagttacgggtaagggggagacaggacaatatttaattgagtcgccgctcgttaagaaagtctcgtttacaggttcagtaccaacaggtattgccatcggtaaacttgcaatgagtagtgatttaactcgggtaagtctggagctgggtggtaaaaatgccatagctgttttggccgatgcaaatattgatgagattttaccgactttattgcaagcaacttttgtgcatcaggggcaagtttgtgcatccccagagcgtttttttgtacaccgtacaaaatatgatgaacttgtcgggaaactctcgaaagcactttcgcagtttaaaattggatcggctatggatgaaggaagtatgtttggtccactctctaatcagccacattttcataaagtgaaacattatttagatatggctaaagccaacaatcagattattgctggtggtgaggctttagatcagaccggatattttgtacaaccgactttaatttcctttaaaaatacggatgatcctttattttcagaagaaacttttggtccagtggtcggagtaatgccattcgaaactgatgaagagctcattcaactgatgaatcagtcacgctttggtttaaccgcaagtatttggacaaatgacttatctaaagctttaggtttaattcctaaaattgaagcaggtaccttgtgggtcaatatgcatacattcttagatccatcagttccatttggtggggtaaaagcttcgggaattggcagagagttttcagatgcctttattgaagattacaccgaattaaaatcggtcatgattcggtattaaactaataaagaggtttgtcattttataaataacaaacctcagtcttttaacataaaaattgggctaaaaagttagtagtttaaagtgatgctttgttgagttgattggtcgatttctttttgactcactgcatcatctttacatttataactttcaaataaagagagctgatctgcaaagtgggcatcaggttttccattttgattgataaaaccactttgtcctggggccaaaatcgaacacatggtaacttgatttggatttaagaccactctaaaagtagcacttcctgtatttccataagtactaaggtgttgttcatgtgatggatcagcccaaggaatgcctaccgaatttttgctggaaaaacccatggttgccaccggaattttccagtcgttcgggtcggtagagtgatattgatttgaaagttcagtcagcgcattttctaaagcttttaatacgacttcatctgctgtttgtccttttaagaaatcaacattctgaggaacgcttgcctgttttccttgcagtgcattccagattaatttcgatgcactcgctggctgtgcacttcgtggatcattatttaccggataaagcgtatcggtataacgcttataaatattttctgaaaggtttggtttgagtaccagttcaatcatttgattaagccatgtacgcgtaattgctggtgctgcaccttgataatatttcgcctcgctatcagggcgtaatttaagatcccaactggcaagtaagggagcgacttttttagctaacggtgttgccttaggactttgtgcagctttgaccatataaggaacaaaataacgcgcatttaaatcagaccatgcagccgttttattaatttcccaaatttcttgctgactcagttttgctttactttctaaaggttcaattagttcattcacccgatctacataagaaaagtttgacgaatctgagcgtaaacctgcataggctttgttattccagcttgtgacataacctttttgcggattgtattctttagggttgtgtgagaagtcataaaaaccttgccactccattgaaccatcacctttagctggaagctgaatatgctggttttcagggcgaataggtaaacggcctaaagcagccacaccgatattatctttagtatcggcatagaaccaagtgatagaggccgcgacacgtttggcttgagcaagaaactcatcccaatttgaggctttcgctgcatttgcccatcctaataaggtttcaatttctacaccttcccagctacgtttttgtgcataggccgtatggttattttcatcccatgtacttacaaaaccttgtttactcttataaacatctaaaacatggtcggcttgattcttaacttttatttttacttgcttgtgttcaaatggaatataaacccctttatataaatattcttttgaattacttggatttagggtaagttgataaacatcgttagtatcaagtgaacctaccgtcgaaccccatgcgattttgccattagttccaaataaaattgcaggcaagccaactggagttatacctgtcaaattatagccagcaccatgtaaaccaatagcgtaggtaattgctggtgtataccatccttgctgtgggccattatataaaactgcttggccttcaatagtcttatcaccttttaatacccatgcattactggcggtaggtacaccatctaccacacttttgcctaaagcaatgcgagcttgagctaaataggttttggctgccttgtttgaaatagggctaatgtctttaagtatttgttgttgatgtgctaaaagctgagttttttgtgcagattgaataatagttggggcacttgggtcatctagccaacgtaattgttgatagactttaaggccttcttcttgacctttttctttttgcagttgcgtgagtaaatctaaatttgttacttccgaacttgctgaaaagaagcgatttaaaattaagcccacccaaaccatagcaatatcttctggttgccatgttgatggtttaaaatcatgatctgtgaactctttaggcataagagctggatctgctaaaacctctttaacacgcttattaaaacctgcggcataaccttcaaaaattgctcggtcttctggtgagagtgcagcgagttgttgcttaatattttctgggtcaaaacgactatgtgtcgcaatatcatattgaagatagtcggggccgaggacctcagcaaccgtaccttgtcctgtacgttttgacatttccatctggaataatcgatcagtcgctaccgaatatccatagccgtaaaaaagtccataggtatcatttgcatatacatgtggtgtaccgaatttatcgcgcttaattgtgatctgcttttgtgtcggtgtggggtctaaacttgatgaggaattacaacccgctaaaagcgcacctaaaagtaatgttccatatttaattaaagggcgtgtagggtgaggccgagagttcagcatagatatgttcaatttagatatccttactttcattatgaatagaagtgagcgatttaagaatcttcttagattcacgtcacagatgaacaagccctgttcatgaatttaaaatactgttatttatccatgtaattttccattacatttgaggtatatatttataccttctcgaacaagttatttaattttctattttgagagaataaaaaaggccgttataggcctttttttgaaatgaatgagttttatagaagacgaatttagcccaataaaaaatcttttaagattttattaaaagcttcgggttgctcgacattagaaatatgagaggcatttatttctgcaatttttgcttgtgggatgcgttgctgcataaattgaccatctgcaacggttgttacagggtcttgggttccagcaatcaataatactggaattttgatgtcttttaactgctcacggacatccgctttagccaaagcctcacaacaattggcataacccattgcgctgccagcacttaagtcgttacacaggttgttgacaatagaaggatgactttggataaagggatctgtaaaccatcgcgaagctgctgtggctgcgattggctgtaaaccttgctcacgtactaattttgcacggtcaagccatgcctgctcttgaccaattttagcagcagtatttgccacaatgatatgactaaaacggttagggcagtgaatcgcaagccattgacctgttaaaccacccattgaaataccacaaaaagcagctttgctaatattcagatgatccagtaaacggacaacatcttcacctaattgctctacagtatatggaccgtcaggcgtagatgatgaaccgtgaccacgagtgtcatagcagatcacaaaaaattgatcttttaactcattaaactgtttttgccacatgccatagttggtgcccaaagaattggaaaacaccagagcaggggaagatggctcgccaaaggtttgatagttgatttgtgcatcagcagattgaaaagatggcatttgtttctccttaaagtgcttcaacacgttcaataatcaaagcaatgccttgacccaccccaatacacattgaacacaaggcataacggccgcctgtttgctcaagctggtttaaggctgtagtcacaagacgtgcacccgaggcacccagtggatgacctaatgcaattgctccaccgtttggattgaccttgtcagagttgtctggcaaacctaaatcacgggtcactgccaaagcctgtgcagcaaaggcttcgttaagctcaattacatccatctgctctaaagtcaggttgacttgtttgagtaattttttaatggcgggtgctggagcaaaacccataatgcgtggttctacacccaccgctgttgaagcaatgatcttggcacgtggtttgaggttgtaagcctgaactgcttcatcagaagcaatcagtagagctgctgcgccatcgttgatgcctgaagcattgcccgcagtaactgtgccatctgctttcacaactggtttaagtttgcttaaaccttcaagggtggtcgatgcacgtggatgttcatcggtatcaatcacaacagcatcgcccttacgctgagggatttcaactgccacaatttctttagaaaaaaagcctctggcttgcgcgcttgcggtgcgttgttggctcaccaaggcaaactggtcctgatctgcacgattgacgttaaactgttcagccacgttttcggcagtctggggcatggtgtctacaccatacaattctttaagttttgggttaatgaagcgccaacccatggtggtgtcttcaatcttctggctacggccaaaagcattgtcagacttacccatcacatagggtgcacggctcatgctttccacaccacctgcaatcaccaagttcgcttcacctgctttaatggcacgggcagcaatggcaatggcatcgagtgatgaaccgcataaacggttaatagtggttgccggcacctgataaggtaaacccgcaagcagtgctgacatacggccgacattacggttgtcttcaccggcttggttagcacaaccatagatcacatcatcgacctgttcccaatctaccctagggttacgctgcatgagggctttaatcggcacagcgccaaggtcatcggcacggacaggtgcaagaccaccggcataacggccgaatggagtacggatggcatcgatgatataagcgtttttcattctaacttttgtcctttacttcaggcctttttagccattctccgtaggtatttcacggtggcgacatggatgtcgcctcgttgctcagcacaacagggaggttgtgcctgagtaacaaaggtttttggttactttttaaaaaaagtgacacgaattagctggtggtacctgacttaaacagataagactccgttgtgatgctttataaattttcatatcaacgaataacatcacagctgtaatttattgtgatatccataggtctgttgtataagcgataccttacttttgaaaggtcaaaagtaacaaaaacctttgttgaacagaggaggcttccatgcctccctgtccaacgggcgacatccatgtcgcctgtcacgatagtgaatgctgtgtaataggtgtttgttgtgtaaaccttacccttgagtcgcatcaatcaaagttgcaccggttaaagcctgtaactcatcaaagctaagaccttccactttctcaatcacctttaaaccgtctttggtcacatcaatcacacacaggtcagtgtaaatacggtcaacacagtgtttacccgttaccggataagtgagctcagcgacaatcttcggctcaccttgcttggtgatgtggtctgtagtgataaatactttcttggcaccaactgccaaatccattgcaccacctaccgcaggaatcgcatccggtgcacccgtgtgccagttcgccaagtcaccattggctgccacctgaaatgccccaagcaccgcaatatcaaggtgaccaccacgcatcatggcaaaggagtctccatggtggaaaaagctgccgccttcaagcatggtcacaaactctttacccgcattaatcagttcagggtcttcttcacctgcagctggtggtgggccaaaagccaacaggccattttcagaatgtaggaagacatctttgtcagcaggtaagtagctggcaatcttggtcggtaagccaatgcccaagttcacataggctccatcgggaatatcttgtgccacaagttgcgcaatctggtcacggctgagtttctggtagctcatgttatttctccttattgcttactgtgcgggctgtacttgtacaacgtgctgtacaaaaatacctggggtaatgatgtgttccgggtctaatccacccagttcaaccacttcagaaacctgggcaatggtgacatcagcagccatggccatgatcgggccaaagttacgtgcagatttacggtaaaccagattgccccagcggtcgcccttataggctttaatcagggcaaagtcagccttgatcggatactcaagcacatagtctttaccatcaatatgacgggtttctttgccttcagctaaaagtgttccaaagcctgttggtgtaaacaccgccccaaggcccatacctgctgcctgaatacggcacgccagattgccttgtggtaccagttcaagttcaacctttccggcacggtacagttcatcaaacacataagagtcagactgacgtgggaaagagcaaatcacttttttaattgaaccggctttgagcagtttagccagaccataatccccattaccggcattgttgctcacaatggtcaagtccttaacgccaagttcaatcagaccgtcaatgagttcagcgggttgtcctgcggtaccaaaaccaccaatcagaatggttgcaccatctttaatctgcgataaaacctcgcttagtgaggacttacttttgtcaatcatgtgagaaaccttagagcatgaggtaacgtgatgtattactaccgctaaaaatttattgaaattcttaatggtagtaataaatggagtaaattttgtgagtcaaaagcgaacttttaactcacatacactttcaattaagcactagcgcgacggcgttcaacttcagttgaaggagcagcagcggcttctttaaccagttcaatgttaaatgtgatgtgtttgaaagcgtgatctaaaccacggcgttgaatttcagcaggatctgtgacatctactgctgttgccactaaaccgtcacgagtagcgaaggcaaagtcatcccataagtactcatcaccctcaatgttgaattgagtagtcagcttgcggtaacccggtgcagaaacgaagtagtgaacgtgagatggacggttaccatgacggcctaacttgttaagaagagcctgtgttgtaccttcaggagggcatccataaccaactggcatagtggttaacgctacatatttaccatctgcatcggtgaaaatggtacggcgtaagttaaagtcagattgtgacttatcaaagaatgaatagttacctaaactgttggcatgccatacttcaactttggcattttcaataatattgccatcagtgtcggttaccgtaccttcaataattaaggtatcgattttgccagtctcggttccgtcatccatacgtgcaaagccaactgattcaggtgcgccagcaacataaagtggaccttcgatagtacgaggtgtaccgcctgtaataccagctttggcatctgcttcatctgcacgtaagtcaaggtaatgttcaagacctaagcctgctgccaaaagaccaagttcatttgcttgacctgcatcggtaaaatattccaaacctttccaaacttcagaaggttggatgtctaaatcttcgatggcttgaaataaatccccaagaaggcgcactacaatttgttgaacacgtgcatcaacttcgccttttgcagtgtcgacattcatttgttttacaagcgcatcaatttgttgacggttcatactaaaactccttaagtatgcaatacggttttgggtggcagcgctgcgggcatttggttttgctagcgaataagtgccgccacgttccttgttaccttctgaataatctgcttggtttttaaatggacttcagagatcgcatttaaaaaattctttctatttacgaatcatcatcacgaacagaagatggatgacggttaagtgccatcacttcaatgtccatgtatggatagagaggtaaaccttgtaaaatgttatgcaattcttcattgctctctacatcaaaaatgctgatgttcgagtactgacctgtaattcgccagatatgacgccatttaccttggcgttgtaagtcttgcgaataagctttttcaacggccttaatttcatttgctttgtcggctggcatatcaagtggaatatgcacatccatacgtacatgaaataacatgggaaactccttatcctgttgccttaacgacgtaatttctcaatcttatcttcatcaatttcaatgcctaagcccggagctgtcggcaaatgcaattcaaagttttcgtaacgtagcggctcttttaaaatttcttcggtaagtaataacggaccaaataattcagtgccgaacgctaacgtttcaaaagttgcaaatacatgggccgatgcaatacttcctacagggccttcaagcatagtgccgccatataggtcgataccagccaaaccagcaattttgccaacttcacatgcttcaatcagaccaccagattgttcaatttttacggcaaatacatctgcaccatgattttttgcaatacggtacgcgctgtcagggccagttaaagcctcatcagccataatggctacatcaaaacgtagggtgaggcgagcaagtgcttcggtattttgaattgcacatggctgttcgattaaatcgattccaccatcttggagctgttgaataccatgaatacactcaagttctgaccatgcacggtttacatctacacgtacactaacatcagcacctaatgcttttttaatagcaatcacatggtcaacatcttgctgtaaaggacgtgcaccaattttaagtttgaacgtgttgtggcgctttagctcaatcattttgcgagcttcagcaatatctttttctgtgtcaccagacgcaagcgtccaaagcacaggtaaactattacgcagacgtccacctaaaacttcgcttaatggcacacctaaacgtttggcctgaatatcaagtagggcagtctgaatggcacacttagcaaagcggttaccattaatatttttacgaatcagttttagtgtttgtgcaacatttaaatctttaactgatgtcagtaatggtgcaaagtaggtatcaatattggctttgacactctcaggactttcttcaccatagttcagcccaccaatggtggtggcttcaccccaaccgacaataccatccgtggtcgtaattttaacgagtaccaaagtctgggtacgcatagtagtcacagacaactggtgaggacggatagttggaatatccacaagtatggtttctatggttctatacatgaagtttcaactattacgaacttgtttgtataccatagaagaatgtaatagcctaaaatagatatagaacggtattttaagatactaaaaaggtatattaatggaattaagacatctacgttattttgttaccgttgttgaagaacagagtctgacgaaagctgcagaaaagctttttattgctcagccacctttaacacgccaaatcaaaaaactagaagaagaattagggatcgatttattcgaaaaaggctctcgtccattaaaagtaacggaagcagggctgtttttttaccagcatgcggtacaaattttgacgcacaccgctcaagctgcttcgatggctaaaaaaatgaagctggtcgagaatgttgttaaagttggttatgtgagttcgcttctttatgggcgattaccacaggtcatttatctatttaggcaaaaaaatcctgacattcatgtcgagcttattgaatgtggtacacgagatcaggtggaagcattaaaactcggtaaaattgatttaggttttggtcgattaccaattagtgatccagccattaagcgacttttactcagaaaagaaaaattaaaactcgcaatccataaaaaacacccattaagtgatttccaagagtcaggaatttatttatctcaaattatcaatgagacaattttttcttatccaaccacacctaaaccaaatttttcgaccactattcaagctttatttaccaaattaggtcttgttccggccaagctgactgaagtacgagaaattcatatggcacttggcttggtggcatctggagagggtatttgtattattccggaaagcgcctgcgacattggaatgaagaatctaacttatttaaatatcttagacttagaagcctatagtcccatttctctatctatgcgtaacatggaccaaagttcctatattcctaaaatcttagattgtattgaagagatctatagcgaagaagaagtatccagaaatttgaatttataaatttttaatacgctttaaattgaattatcatgttattttaaaactttaaacctataggtaatatgtaaaaggaattattaaatgagaaaaattttaggtatagcttctctcattatgtctacaggtgttgtacatgctgaacaattaaatgaacaagaacaaatttctccgtatagtgcgaatgtgacttttgcaagtcaatatatttcgcgtggttttcaacaaacttggggtaagcctgcactacaaattggtttcgactatgcaaatccgaatgggctatttgtgggtacttgggcatccaatgtaagttctaactatctccgtgatgcttcagttgaatgggacttttatgcaggttatttaaaaaccatcgataaattctcaattggaatgtctgttttttattattattacccaggtgcaaaaagtacggctgaaacggggagtacaagctataactatggcgaaattgtgcctcaaattggctatggtcctttaagtctcaaatattttattacttataccccagattacgcaggttataactcaaatacgatgggtggaccggaaggtaaacgttcacgaggaacaacttatttagacctcaactttacacagccgatcaatgaaagttggacttttggtgcccactatggctatgaaagaattaaaaacttctcagaagctaattttcaggatatgaaagtcgaacttattaaagatttaggtgatggctggactacagggttagcttataccaaagcatgggacaaagacggatactatagaaattatagtaatggtgaatcagatgcaccaatttcaaatccaattcactcaacctttacagtagctgtaaaaaaggtgttctaatttatacataaaaagcctgatcactttaatttggagtcagcaggctttttctaatacatagagaaaattattttttaattaaatcataagccattttagtatcgtctagctgaaccagtgaagcatgacgagcagagagcggatctttattttcaattgctgtcaaaatagctttatgtcttggtaatgaatgaccttgtaaatttgggcgtagactggtgacttgaatcgattgctgcaaaggtaaaaccagcatttttgacatataagccaataagtcattatgcgttgctttggcaattgctaagtgaaactggatatctggctctataaattcttcaactgttgttgccttttccattccttcataggcttgcttaatacgttcaatatcttcttcatttgctgtacttgccgcaatataggctaactccggttctaaaacgcgtcgtacggtagaaagtgttttaaaaaactcgtgctcaggcgtggtttgaatcaaccagaacagtacatctgggtcgagtaaatgccattcttctttaggtcgaactactgttccgattttgggccttgaatatgttaagcctttcgcatttaaaacacgtatagcttcgcgaaagacagggcggctgactttatattcctcacataaatcaacttcacttgggagtttttcattttctgaaatttctccagaaacaatttttaatcccaattgttgaacgattaatgcatgttggcttttgcttggaataggatttttatagtcagctttactcatatttcactattacgacatgttgaatatcctatggtatagatgaccttgtgttttaacaagatcatctttttcaagaataaatattaatgggaatgacgtggaacttctgagccacggcaaccgaccaagaaatcaaaatcacaaccctcatcggcttgtaaaacatgttctacatagagcttacggtaaccgccaataaaacttggtggagctggtggtgctaaattttcaagacgttgcttaagttcttcatcactcacttctaggtgaagttttccagcataggcatcaagttcgataaagtcaccattttgaactacggccaaaggcccacccgccatagcttcaggggcaacatgtaaaacgaccgtgccatacgcagttccactcatacgtgcgtcggaaatacgaaccatgtcggtaatgcctttggctaaaatctttggtggtaggcccatatttccaacctcggccatgcccggatagcctttagggccggcatttttcatcacaagaatacaagtttcatcgacatctagatctgggtcattaatgcgggctttataatcatcgaagttttcgaatacgactgcacgaccacgatgcttcataagttcgggtgtggcagcagatggtttaagcaccgcacctttaggcgctaaattcccgcgcaaaatacacataccgccatcttgtcgaattggattatctatttttcgaattacttcatcgttataaataggtgattgttggcagttttcccaaatggtttgaccgtttacggttaaagcttgaggatgtggtaagagattggcttcacccatgcgacgaatcacggctggcaagccgccgctataatagaactcttccattaaaaaacgacccgaaggctgtaagtcaacaatggttggcatgccacggccaacacggttccagtcatcgagttgtaaatcaaccccaatgcgtccagcaattgcttttaagtgaatcacggcattggttgaaccaccaatagctgcattgactttaatggcattttcgaaagcttctttggttaagattttggaaagacgtaaatcttcatgaaccatatcaacaatacgcatgccagaaagatgagccaacacataacgtcgagaatctacagctggaatggccgcattgtggggtaaggaagtgcctagggcttcagccatacaggccattgtagaagctgtgcccatggtattacatgtaccagccgagcgcgacataccagattcagcagataaaaattcatttaaatcaattttgcctgctttgagttcttcatgcatttgccaaacgatggtacctgcaccaatgtctttacctttgtgcttaccattcagcatgggaccgccagtcactacaatggcaggaatatcacaacttgcagctcccattaataatgcaggggtggttttgtcacaacctgtcagtaacaccacaccgtcaatagggttaccacgaatcgcttcttcaacatccatactggctaagttacgggtaaacatggcggtaggacgtaaattcgactcaccatttgaaaatacaggaaactcaacagggtagccgcccgcctctaaaattcctttttttacgtgttcggcaatttttcgaaaatgcgcattacatggggtgagttcagaccacgtattacaaatcccaatgataggcttgccttgaaactcatgatctggaattccttggttcttcatccagctgcgatacataaagccatttttatccgttgtaccaaaccaggcagccgaacgaagaacttgtttgttattcatacaaatttccctatatagtattactattagaattaattaaattaaaaatacaccataaattttatttttaaaaggtttgaaatttaaatagtattactatattttaaattgaaaggataatttacgagcaagatgctctataagtaaataataggaaatggagtcgaagatggatttcgaaaaggatgtaatacggacggtcacgtttaagctaatacctgcattagtcatactatatctcgtggcatacattgatcgtgccgctgttggatttgcccatttgcatatgggtgccgatgtaggaattggtgatgctgcctatggtctaggagctggtttattttttattggatattttctttttgaagtcccaagtaatttgcttttagacaaatttggtgctcgtaaatggtttacccgcattttattaacatggggcctcatcaccatggccatggcgcttattcaaggccctaaaagtttttatctcttaaggtttttactcggtgtagcagaggcgggttttttccctggtgttttatacctaattacgcagtggtatccggtgcggcatcgcggaaaaatcatgggaatgtttgtgctttcacaaccaattgccatgatgattgcagggcctttagctggtctattacttggaatggatggcattgcaaatttacacggctggcaatggttgtttgttgcagttggcttgcccgcggttttattggctttacctacctttttgtggctgcccgataacattgataaagtaaaatggttaagcattgaacaaaaacaatggcttaaaaatgaactcgttaaagatgaagccgaatatgaccaaacccgacatgccaatccactacatgctttaaaagacaaacgcgtacttttattagcactttactacttaccggtaactttaagtatttatggtttaaatctctggcttcctaccattattaagcaatttggcggaggtagtgatattcaaattgggttcttatctagcattccctatatttttggaattattggactcctcattattccgcgtagtactgaccgcctaaatgatcgttacggacacttaagttttctgtatgcactaggtgcttgtgcaatgtttttaagtggttggctaaattccccagtcatgcagttggcagctttggctgtagttgcgttctgtctattttcatcgactgccgtgttttggacactaccgggtcgtttcttaacgggtgcaagtgcagcagctggtattgccttaattaactctgttggaaatttaggtggctatgtcggtccatttgggatcggactgttaaaagaatacacgggaaatatggctgctggtttgtatttcttatctatcgtcatgctttttggcttgattctgacttacatcgtctatgccaagctcgaacgtcaaaaaacacaaacagtgaatattcaaaagcctttgtaaggaataaaacatgcaaattattcaatttgaaaatcgtgcaaatcaacgtgctgttgccaaagtagaaggcaacatggcatatccggttaaaaatattcaatcggttcgtgatttagcacttttggcaatccgcaataaagtttcactggaacaacaagttgaggcgttagggtttgagtccgaaacttatgattattcatctttattagcagacttaaaggtattgccgcctttagatcatccagatccaacgcattgtttaatttccggtacaggcttaacccatttaggttctgcatctgcacgcgacaaaatgcatcaacaaaatttaagcgatgacagctcggtgaccgacaccatgcgaatatttcaatggggcctacaaaatggccgtccagcacaaggtcagatcggtgcgcaaccggaatggttttataaaggtgacggttcaattgtggtaagaccgggagctgaattacctttaccaccatttgctgaagacggcggagaagaacctgaaattgcaggcctctatgttattggcgaagacttaaagccttatcgaatcgggtttgcgctgggtaatgagtattctgatcatgtgatggagcgccgtaattatttatatctagcacattcaaaattacgtttttgtagttttggtccggctttacggacgggcgagttaccaaaacatttagtcggaaccagccgtttgcgtcgtgatggacaaatcatttgggaaaaagagtttctgtcaggtgaagacaatatgtgtcatagcttggcaaatctggaatatcaccattttaagtatcaacaattcttaaaagcaggggatgttcacatccattatttcggtacagcgactctatcttttgccgatggtattcaagcgcaagtcaacgatgagtttgaaattgaaatgaaagaatttggacttccgctcataaacaaacttgctcatatgcaacccgaattaccgatcggttcagttattactctctaaggaatataaaaatggtcattggacacaactttattggcggttcacgcagcgcacaaggtacaaccttattaaaaagtattcaagctacgactggtgaagctttgccttatgagtttcaccatgcaaccgagcaagagattaatcaggcctgtgaagcagccagtcaagcctttaagacttaccgccataccacacctgaacagcgtgctgtttttttagaaaatattgcagatgaactcgatgctttgggtaccgattttctagaaattgtctcacaggaaactgctttgccacttgcacgtttacaaggtgaacgtgcccggaccagtgggcaaatgcgcctgtttgctaaagtgctgcgccgtggtgattttttaggtgcccgtattgataccgctttgcctgagcgccagcctttacctcgcccagacctgcgtcagattaaaatcggtgtaggccctgttgcagtctttggggcaagtaactttcctttagcattctcaactgcgggtggtgacactgcttcggcactggcagcaggttgctctgtagtggtgaaagcccatagtggacacatggcgacagcagattttgtagcgcaggcaattgagcgtgccgtagaaaaatcaaatatgcctaaaggcgtatttaacatgatctacggtaatggtgtgggtgaaccactggttaagcatcctttaattcaagctgtgggttttacaggttcattgcgtggtggacgagctttatgtgatatggccgcagcccgtccacaaccgattccggtgtttgctgaaatgagcagtattaacccgatgctgatgttgccagaagccttaaaaaaccgtggtgaaaaaattgcacaggatttggcagattcagtggttttaggctgtggtcagttctgtaccaatccgggtttaatcttgggaattaaatcagctgaatttagtcagctcattaacaacctgaccgacattatgggggctaagcctgcgcagactatgctcaatgccggcaccttaaaaagttacaccgctggtcttgagcacttgacccagcatcaaggcattaagcatttggctggcaatactcaacaaggtaatcaggcgcagccacaactgcttaaagctgatgttgagcttttactggcgggtgaccagcttttacaagaagaaatctttgggccaaccacagtcgtcattgaagttgaagataaagcccaactcattcaggcactacaaagtatgaatgggcaattgactgcgactttaattgccgatgaagctgacttaaccgagtttgcagatgtagttccagttttagaggaaaaagccggtcgattacttataaatggctacccaactggtgttgaggtctgtgatgccatggttcatggtgggccatacccagccacttcagatgcacgaggtacttcagttggaaccttggccattgaccgttacttgcgccctgtgtgttaccagaactatccacagagtctattgccggaagccttaaaagacagcaacccgttgcagattttaagattggtcaatggtgagatgaccagagaagcgatctaagaataaaaagagaccagatgatggtctctttttcatagtcaatttcaaatgtgaaataattttcatatttgaaataatattttatttttaagtgattgattttaatattaaaaatagtggcatgtaatttgctccaataggattagctacaaggagtaaataatgaatgcgaatcatatactgcaattgagcggaatattgcagcagaatctagggctaatccctcatgaaattcagttaaaaaaaatgagtggcggagctatccaagaaaattggctagttcaatctgaagattttgcattagtactgcgtaaaaatgctgaatctagtgtagaggctagttcagatcgggagcaggaatttttacttttagatcggttatatcactttggcattaaagtgccagagccactttatttcgagaagtcacctaactttttaaacagtgatttcttcattatgaaaaaaattgatggtgttacagaaggccataaattagttcgaattacagaagaagaaaaacgtaaaaagattactcaagacattggtaggcaacttgctttaattcatgccattcaatcagatgaagtattagagaaactacttcctaagccagataaagatcaatatttagaaaaaaagcttacagtttttctagaacaactggatcacttaaaaagacaacgtccaatccttgagtacgctattcaatggatgtttaacaatcttccaaaagtcgatgatttggtcttagtccatggtgattaccgcattggtaacatcatgattaatggcgatcaaatttcaggaattttagattgggaatttacgcaatggggagatcgaagagaagacttaggatggtttacctctaaatgttggcgttttggtcaagatgaaaatatagctgggggaataggttcatataaggactttgcgaaagcttacgctgagatttccgatatttatatccctgaatttgaaatgaagttttggcatgtcctgtctcatgttcgatgggcaattattgcgatgcagcagtctgaccgaaacaatgaaatggatactccatcactcgaattagccctaacggaatttttagttccccgccttgaaaaaaatatcttggaaatattgggagaaaaagaatgagcgagcaaaagataattgacctgatcaaagctagccaagccgtcattaaaaatgagcttttaccgcaatcgggcagtcagaaatataacttgttaatgctcatgagaagcttagaaattttgcaggcttatattttgcaaaaagatacctgtacattgcatcgttcaggcattttacaagattatttttcatttccaattaaagatattgatgaggcaactcaattgtttattagcgatatccgtgaaggtaaacaatcggatcaaacttttgagacattaaaagccctgaatttggaagaattaaaaattactgaaccgaaggtggccaatcatggataaatatcggctacgaatttatttggttcgacatgggcatgtttcatactttgatgcagctaataatccgattaatccgaaatttgcacagttatccgaacgaggaatagagcaaatacaacaactggctcatcaattacaagttgttaattttgaaaaaatttactcatctaccatgcctcgttcgattcagacagccgaaattttgaagcgctatcaaaatgagtataaagacattcagtcattcgatgatattcgagaaataagagcaggacgtttaagagaaatttcgttggatcgcgctgagctggaaatcaaaaaggcctatcagttccataaaaataaccttgaattatttgtacaaggcgaaagttggactcactttattagtcgtgtactgacttggtttgaaggcatgatattaacggcaaacaaagaccagaatatcctcatttcttcacacgatattgtaaatcgaatactcattaattgggtttatggacatgacttcaaagatgtttattcgcaggaacaagattatggctgcttaaacattcttgatctgacgattgaaaatcaaaaggtaataagcaaacgaatcaagcttcaaaatttcacgccgtacaatctgattaaaaatgagctatttaatagcgctatggatgatgtgtatgaaacttatatcgcgactcaaggctttaaattaaaggagctcagctcatgatcacactatctaatgaattattagagctacaacagaaagttagagaatttattcagcaagaggtgattccattagaaagtgatcctcgccaagatagccatggccctagtgaagctttacgccaagaattggtgagtcgggcgtgtagttgggggctgctaactcctcatgcaagtcgagaaatgggaggacttggttggtcgcatctgcaaaaggctgtagctttcgaagaagcaggatactctgctttaggcccaatcgcgttaaatattcatgcgccagatgaaggaaatatccatcttttagatgttgtggcaaatgatgcacaaaaagaaagatggttaaaaaaactggtagctggagaaattagatcttgctttaccatgacagaacctgcaccaggtgctggctcggatccatccatgcttcaaacaacggcaattgcagatggcgatgactatattattaatggccgtaaatggttaattacaggagccgatggagcgagcgttgcgattattatggcaaaaatggaagatggctctgcttcaatgtttctaacagatacaaacgttgaaggctttatattagaaaaaaatatgaatgctatggactcatgcttttcaggcgggcacggtattttacgctttgagaatttacgtatacctaaagaaaacgttttgggtgaaattggtaaaggatttaaatatgctcaagttcgccttgcaccagcacgtttaacacattgtatgagatggctgggacaagcaaggagagcacatgatatcgctactcaatatgcacgagaacgccaatcttttggtaagagattaggagaccaccaaggcgttggttttatgcttgccgacaatgaaatggatattttaacaactcgattagccgttcactattgtgcgcaggttttagatttgggtgagaaaggaaattacgagtcgagcctagttaaagtgatcagctctgagggtatctggcgtgtggtggaccgatcagttcagattttaggtggacaggccatgacggatgaatcagtggtctgcaagatttttaaagatgcgcgaggttttagaatttatgatggcgcaaatgaagttcaccgcatgagcatagccaaaaaactattagggaaacaggcataataaaacagggataagagaatgaatatttttgatgtaaaagataaatatattttaattactggtgcttcaagcggtctagggcatcacatagctgaattatttgcaaaagaaggtgccaatatcgttatttgtgccagacggttagagcgattgaaagaattagaatcgcatataaaaaatgaatatggcgtacaagtttatacctttgcattagatgtaaatgatcgttccgctgtgaaagatatgcttagttctttagaagctgaaggagtcactatagatgtgttaattaataatgccggggtgagtgataccaagcgtttcttagactataacgatgaagattgggataagattgtagatactaaccttaaagccccttggcaatgtgcacaagaagttgtgcagcatatgattaaagctgaacgaaaaggatcgatcatcaacattacatcaattctgtctcagtctaccaacctaggtgttagtccatactgcgcatcaaaggctggattacgccatttaacagaagttatggcagtagagttggctagatttggtataaatgtaaatgccatcgctccaggttatatgattactgaaattaatgaagaatatttaacgagtgaggtaggccaacagcttttaaagaaaattcctacaaggaagtttgtagagtttgatgacttaaatgggccattactgttacttgcttcgcaagcgggacaaggcataacaggtatcgaaattaaagtcgatggcggtcatagcgctgcgcctatataaaacgttttttaatggagtaaaaaatgctgaatcgaaaaccaattaatattttggtcacctatattaaaaaacctaatattaatggttttcgttctttggttgagcaggcgattagtgaagtagagtcgaacgaaattgatttggtggaatgccatatttcagatgtacaagatgttgctcaaagcttagtagaaaatggctgtcagattcttctatgtacgggagcgaccgcgagttttctacagaagaaattaaacattgatatacaggtcattcgaactggtacttttgatgtcattcaagccatatcaaacttaaaacaatataagcgaattgctttggtgggtaatacgtccacagtcgatcttgagaactactctgatatttttgctttagatatacaacagtttaactatgactcatatttagatgctaaaaaaacaattcatttaattaaaaatcaaggctttgatgccattattggttcgcctgttgcagtagaattagctctgaatgaaaacctagtcggacatttggcgattagtgtgccgtctttaaaagaccttctgcaaaatgccttacgtacccttgaaaagattcgtagagaacagtattcaaccttacgtttaaccgagatctttaatcacttaaatgaaggcatttgttttattacaaagcaaaaaaagatttctttaattaataattcaatgagttcgttacttgaaaaagactcttcagacgttttaaacaaatcagcactcgaaatttttgaaggtttaaactttgatatcgatcaagaaaatagtcatcaactcgtccaatttaaaaatttaaaacttgctgtatatatttccaaattaaaaaatgactacatagatggctatatcttaagagtgcaggaactaaatgcattagagcagtctaatagtcagtttagaaaggtttcatcaaagaattttaatacaagatatacctttgaccagatcttgacgcaaaatccaaattttcaacaaatcattaagttatccaaagcatatgcaaaaaccgatagtaccattctcattactggtgaaagtggtacaggtaaagaagttttagcacaaagtattcataattatagcagtcgttataaagcgccgtttgttgcaatcaactgtgcatcttttccggaaagcttgttagagagcgaattatttggttatgaagaaggtgcctttactggggcgaagaaaaatggacgtattggtctcattgaagcagcacatacgggtacgctttttttagatgaaattggagatatgccattacatctacaaactagatttttacgggtcttacaagaaagacaaattaaccgcttgggctcagtggtaagtcatcatttagatatacgtgtgattgctgcaactcatgcggacttagaagaattggtacgaaatggaagctttcgggcagatctctactatcgtttaaatattttaagagtgtatacgccgtctttaaaagaacgaaaagaagatatcttgtatttagcaaattcctttctagagaaatatagaaaaacactgaatgatttgccgagtattttacagaaggcttttttacactattcttggccgggtaatatccgcgaacttgaaaatatcgttgaaagaatcaatgtgctattacagcttgatcatgaaattttaactccagaatttttaaagcaacagttacccgagctatttcaatctcaaaatcaccacacgacgcaacctttattaaaagaagtaaaagttaatcaagagttgagtttaattgagcaaacacttgcagaagtagagggtgatttagaccttgctgcacaaaaactcgggattagccggaccactttgtggcgtagaatgaaactcataaatcattaatttcaaaattgaaatcttttcaaaaaagaaaaataaaataattaattaagttattgaaaataataataaaaatatttggcatcatagttgcattgactcatgtaagcatctgaatcagttgctaaattgtgtgaggaaataagaatgacgaatggattaatgatgcattgtaatttaaacattacttcaataatgcagcatgctttgatagtttacgcagatcaagaaattgtaactttgaaagcagatgggataagtaaacaccgatatacatataaagatgctttcgaacgtgtagctcagtttgccaacgcactagaccgattaaatataagttctgatgctaaagtcggaacgatggcatggaactcatttcagcattttgaattgcactatgccattccatgtacgggaagaatttaccatacaattaaccctaaattggcgcctgaacagctcattcaaattatcaattctgctcaagatgaggtactcattattgaaccagattgtttggcattagttgattcgatttatgacaatataaagccagtcataaaacattttattgtgctcggggaccccaataaaaatttaaaagcacaatttgatttcgtcttttatgaagaactcattgctccagagcagtcttattatgattggccagatatccctgaagagcgtgcaagtggtctttgttatacatcaggtacaacaggggatcctaaaggcgttctttactcacatcgtagtactgtattacatgcattaatactaagcatgccaaatgcgattggcttaacgcatgatagctgtatcatgcctttggttccgctttatcatattagcgcatggggaatgccatttaatgcggttttgtcgggggcaaaaatcgtttggcctcattcatttgcgggccaaacagataagattttcgacctgatccaatcagaacacgtagatatttctatggctgttcctaccatctggaattcttttaaaaattatcttgaagaacaccatatttcatcagtcagtttaaaacgtgcaatatctggtggttcagctgcgccatattcgcttattgagtctttgagccattatggaatttctgttgaaaatgcttggggaatgactgaaaccagttcaatggcagcgtgtaaccgagtagaccaaattaaaaataatatcgaaacccaatcgattaaatgcggtaaacctatcttcggtattcaaatgagattgcgtgatgagaatcatcaattacttcctcatgatggtgtgcatgaaggcattttagaagtacgtggtcatacaattgctaaacaatatatcaatcaaccaaaagcaggagaagaagagggcaaatggttcgatacgggagatatcgcctgcatagatgaatatggatatatgcatattacggaccgtgccaaagatatgattaagtcgggaggagagtgggtcagcagtgttgaagttgaaaatgcagcgatgggatatgaaaaagttgcagaagccgccgttattgctgccaatcatcctaaatggggagaacgcccacttttaatattggtgccaaagtctccacaagaaaaaattgaacattcagaaattgtcatttttctatcatccaaattacataaatgggccattccgtcagcaaccatattggttgaagaaataccgcatacgcccactggaaaaatcagtaaaaaaatattgagagaacgttatcacgactatttcaccaatagtgcttttgctgaatgtaaataatgatcaacataaaaaaggattttttatatgaacatccctcaggaagcaaatatcgttttagatgcgaaatttaaaaagatggtaaagcagagaaatcgattcgccgttttcttaagcttaattgtactcagcatttactttatttttataggaacagccacatttcatcccgaattacttgcaattccattagaagcaagcaaagtcaccattggtttaccaattgctgcaattgttattgtattgagctggattataacgggattttatatatttattacgaatcaatactttgacaaacaaaaagaaaaattaagaaaggaatatcgttatgaataaatattttgcttttactattttgaccttatttagctccggtgcttgggcttcacaaagcgagccaaggaattggaccgcaattattatgtttgcatgtgtagttggtatttcactacttattacttttaaagctgcaaagaaaacagtatcgaaagaagatttttatacagcgggtaatgctatttcagctaagcaaaatggtttggcgattgcgggagactatatgtctgcctcaaccttactcggtatttctagtatggttttcttcaaaggctatgatggttttatctatgtgacaggcttttttgtttgttggcccattttaactttcttaatggctgaaagactaagaaaccttggcaaatatacttttgcagatattgtttcgtatcgattagatccacagcgcacccgtattttggcaacgtgtggttcacttattgttgtgtgttgctatttaattttgcaaatggtgggtgcaggtcagctgattaaattattgtttggtctagattataaaattgccgttatgctggtcggttgtctaatgctggtgtatgtcattttcggaggaatgcttgcaaccacatggatacaaatagttaaagctattcttttgctctttggcggaaccgttttagtctttctggcatataaagcgtttggttttagtttaaataatatggctgaggctgccgttaatacacataaattaggacaaaaggtgttagaaccgggtccaatgttatccaacccgattaatacactctctatgtctattgggttgatctttggtttagcaggtttaccacatattctgatgcgcttttttacggttccaaatgctgctgaagcacgccgttcagtcttttatgcttctggttatattggttacttctttattgtagtttgtattttaggtttagcttccatcgccatagtaggcacgaatcctcaatattttgtagatgggcacctcggtggagatttaattggcggcagtaacatggttgcgatgcatctagcaaaagcccttggtggaaatctattactcggctttttatctgctgtagcatttgcaacgattttagctgtggtggctggcttggtacttgctggagcttctgcgatttcccatgatttatttcaaaaagtcattaagaaaggcaaggcaactgaaaagcaggaaatggttgtatctcgactttctgtggtggttctaggtgtgattgccatagcatgtggaatcttatttgaaaaaatgaacatcgcttttttaatgggacttacatttggtattgctgcttccgctaactttcctgtacttattctttctatgtactggaaagatttaactacccgcggcgccatatttggtgggtttgtaggaatcatttccgcaattacctttgtagttttatcacctacggtctgggtaggtgttttagggcatgaaaaagcaatattcccatttgataatccagcattattttcaatgcccctcgcttttttagtgagtattgttgtgtctttgactgataaaagtgaaagagccaagttagataaacagggttttgaattacaagtggtgcgttcagagcttggggctcaacaagggtcgtttgaaaaaatgcctttgcattaagtctattaaataatcccaaaagtaagatagctggagtggattatgagagtaaaggaaagagagatgactccctatataagttaataataatttggacttattaagtaaaaaagaccagtattaactggtcttttttactttcagtttttattttttgacgattaaagctaacttaccaacatgttgtccttgatcaaggaattcatgagcttggcgagcttcttcaagatcaaatgttttatataacaagggttttatctgtccttttgaaattaaaggccataccttttcttgcagtgctgccatcacttctgctttcgcttctgcagtttgagagcgtagggtagcgcctgtatgagttaggcgtttagcaagcatcggaaaaatattgactttgtccgctaagcctttaagcacacctatttgcaatattgtgccgttcattgcagcgacttcataatttcgctggatgtaatctccagcaataatatccaagacaaaatctacacctttaccatcagtatgtttttttacaacttcaacaaagtcatcttcattataatttatggctacatcagcaccaatttttaaactcgcttcttgatgttctttgctcgaaactgttgtaaaaattttggttgctccaaaagctcgagttaacatcgttgcggtagtaccaattcctgaagtaccgccatgtattaaaattgaactgtttggacggaattttgcatgttggaaaagatgtgaccaaactgtcataaaagtttctaataaaattccaccttcaattaatgtcagaccttcaggaatgaagagtacattatcttgatgggcaactacatattcagcatagccaccgcccggaactaatgcacagacttcatctccagctttaaacttagtaacttgcttgcctacttgtttaacaattccggaaacttcaaggccaggaatgtcagttacaccaggcggtggtgcatacaaaccttttcgttgcattacatctggaccgttaatacctgctgcaacaacttcaattaatatcccatcatctgttaactcaggcataggtctttcactaaccgtaataacttcagggccgccagcacctttaaaagtgatacatttcataaagttgtttccttattagatattgttaattaaataagcggaattgagactgagtgcgcaatcccgcttaggatgaaaaataattaagatttagcttttttcttacccaaggtaatggcaagtgctaactccatgaattttccaaaaggagcatgtaagaagcttgggaaattccagcggccctgatcaaagacaccttttgcatggctcatagaacggaaaccttcaattccgtgataagcacccatcccacttggaccgataccaccaaacggtagatcgtcttgtgccacatgaattaaggtattgttaataccaacgttacctgaagtcgtacgtcgtagcagttttttgcaatctgcatctttttcaccaaaataatataaggcgagtggacgatctcgttcattgatgtagttaattacctcatcaatatcacggtaggtacgcacgggtagaattgggccaaagatttcttctttcataattgcatcatcatcttttgctcctacaacaagtgttggaacaagagtacgagtgcgattctttgccgattcagatttgactcctagttcaatgattcgtgcgccattttgtcttgcactatcaagtaagccttgtaaacgagcataatgacgttcattgacaattgaagtgtaatcatcacagtctggcccgtttggatagaatcgagagactgtcgcgttgtattcttcaataaatatttctaaatcatcttcatgaacaagggcataatctggagcaacacatgtttgtccaccattggataattttccataggcaatactagtcatggttctcgagtttacgtgccctcgacctacaatcgctggacttttaccacctaattcaagagtgagcggaacgaggttatcacttgctgctttcatgactttacagcccacaggtgtacttcctgtaaacaatagatggtcgaaaggtagtgcactaaattcagcaccaacttcaggcccacctaaaataaccgcaacttcttctatagaaaagttcgccgcaagcatgcgtgaaatcacttcacttgttcgaggggtgagttctgagggtttaagcattgctcggttaccggcagcaatcgctgtagcaaaaggaataagcgtaagagaaatagggtagttccaaggagccatgaccccaataacccctttcggctgatattctatgtgagcactagctgagcgatagaataagctgacatgacgcttttctggcttcatgaaacggcgtaaattacgcgttaaataatcgatggactgaacaataccaacaagttccatgacatctgtttcatgatatgaacggtgtccaaagtcttcacttgcagcaacttgtaattcactacgatattcaatgacagcagcacgaagttttgcaagacttgctttacgctgttgaagtgttggtggttcagctttcaaaaatgctttgcgttgtcgagagagtatctctgatgcatttaaagtgctgcttacttcattgagagtattcatcttaaacctcaaaacatagcttaacgatcctaagctaactgactgatgattaaagtttagtcggtagatttaatacgacctgagcatcttcaatcacatcgagacgaagaatagtagatgcgcccaactggtctagaagctggctcacatggccgccatggcgtgtcacttttaccttgcgcgggaaaagtttttcaccaaacgagagaacattggtttgcactagagtttgatgccactcgttatcgactaaatgcaacatcgtggctttacccatgcgggattcagacttaactctttttaatgacggagttgcggttgttaggctaatatctaatttgttgtaagttgaaagtgttgcttcaacttttttcttatcaatctttacatcaatttcggctagccattttggaagttgataaccatatacgccacgtacacgtgctatttcagtgtcgacaggtaaagctaatacatgcgcataaaagtgatgtttacgaatcgagttaatcagctctaaagcatgcggaccatgagctttaggtttacgcacgacaatagctacagacgcttcattgtatggatcattatcacaaactgtataagtgaaaaaggtgagtgcaactagtccataacctggaaaagcttccaagggtactagaggcgaaggtaattttttctttaacagcttaacgggtgcaagcatcaaaacttgcacattgccgctacgataataaaagttgggagcccagacaggtccaactcttgattcaactaactttttaggaatgctacggaaaaaatcaatatttccagctgcaggatcttttgcaacttcatctaaatcaggattcattctaaagcggtcataataaccaccttttggaactttaactttctgttgaccaaattcaacttcagtgaacgctttatttgtattcataattggttaacctttaaattgatcgactgagtagctgataatctttaaaagcagatatcaactttctgcctgtaggattactataagtttaaagttcacttgaatgtcaatatgctatttctctaagaattaaaactgcttgtaacgaatttagaataacttttaataagaataggtagagttgattagcttttagatgatctaaagaaaacccttagtttttaggactgtagaaattatttttttacactttttaaacgctgttttctctaaaatctattgaccttaaagtgaactttaaccttactatgttatgactatccatgagggtaggattgaaaattttatatgtacttattacgaattaattagagcatatacagtaaatcgatagtgtaacttttacacaggagaaacaaaaatgggatatgtcacaacaaaagacggcgtagatattttttataaagattggggccctcgcgatgctcctgtaattttcttccaccatggttggccgctcagttcagatgactgggatgcgcaaatgctttttttcttaaagaaggttttcgtgtagttgctcatgaccgccgtggtcatggtcgttccactcaagtctgggatggtcatgatatggaccattatgcagatgacgttgctgttgtggttgagcatttaggtgtacaaggtgcggtacatgtagggcattcaacaggtggtggtgaagtagcacattatgttgctcgttatcctaatgaccctgttgctaaagctgttttaattagtgccgttccaccattaatggtgaaaactgaaagtaatccggatggtttaccaaaagaagtttttgatgaccttcaaaatcaactttttaaaaatcgttctcaattttatcatgacgtacctgcaggtccattttatggatataaccgaccaggagcaaaagtatcagaacctgtggtgttaaattggtggcgtcagggcatgatgggcggagcaaaagctcattacgatggaattgttgctttctctcaaacagattttactgaagacctcaaaaagattgaaattcctgttcttatcttgcatggtgaagatgatcaggttgtaccttttgaaatttcaggtaaaaaatctgcggaactcgttaaaaacggtactttaattagttatccaggatttcctcacggaatgccaactacagaagcagaaacaattaacaaagatcttttagcatttattagaagttaagtttaaaaaagagggcagccaaaattgactgccctttttattgattcgattgattatttttttcgggtgcatattaatgaatgacgatactaaaaaatgtcctttttcccaacttactactgattttggggctccagttgtagataaccagaatagtatgacggcaggtgcaagagggcctctacttgctcaagatttatggttaaacgagaaattagctaactttgttcgtgaagtaattccagaacgtcgtatgcatgcaaaaggttcaggtgcattcggcactttcacggtgactcatgatattactcaatatacccgcgctaaaatctttagtgaaattggtaaaaaaacagaaatgtttgcccgatttaccactgtagctggtgaacgtggagcagcagatgctgaacgtgatattcgcggctttgctttaaaattttatacagaagaaggtaactgggacatggtggggaacaatacaccagtgttcttcttacgtgatccacgtaaatttccagatttaaataaagcagtaaaacgcgatcctaaaactaacttgcgtagcgcaacgaataactgggatttctggactttattacctgaagctttacatcaggtcactattgtcatgtctgatcgaggtattcctgcttcctaccgtcatatgcacggttttagtagccatacctatagtttcatcaatagtgcgaatgaacgtttctgggtgaaatttcatttccggacccaacagggaattaaaaatttaacagatgccgaagctggtgaattagtggggcatgatcgtgaaagtcatcaacgtgatttattcgatgcgattgaacgaaaagatttccctaagtggactttgtatgtacaggtaatgcctgagcaagatgctgaaaaggttccatatcatccatttgatttaacaaaagtctggcctcatggagattatccattaatcgaagtgggtgagttcgagctgaatcgaaaccctgaaaatttcttcttagatgttgaacaatccgcttttgcaccaagtaatctggttcctggcattagcgcttccccagaccgcatgctgcaagcccgtttatttaactatgcagatgctcagcgttatcgtttaggtgtgaattatcagcaaatacctgtaaatgcggcacgttgcccagttcatagtaatcaccgtgacggtcaaggacgcatcgatgccaattatggtggtcttccacattatgagccaaatagttttggacaatggcaagagcagcctcagtacaaagaaccaccgttaaaaattaatggggatgctgatttctggaattatcgtgaagatgacaacgattatttcagtcaacctcgtgctttgtttgaacttatgactcctgagcaacaacaggctttatttgataatactgcacgcgcaatgggtgatgctcttgatttcattaaatatcgccacattcgtaactgttacgcatgtcatccagcttatggcgaaggtgtggctaaggcgcttggtttgacagttgaaaatgctcaagcagctagagaaactgaccctgcacgtggtttaccaagttttatttaaatctttaaaaacagaacataaggctatgtcaataatagctttatgtacttaactattttatagcatcgaatgaaaaaattaatatctacactcagtctcggtattccatcattattcttcacaagtaatgtacaagcagggctgaccattcctgtgggttttaccaaatcagattcatttatatttaacgcctcaagcaaagactgcttataaagaggctttagctttacctgaaacagccatacctttattagatttagattttggtatattaactcaaaattcatcttcaaagattcggtttaactaatattatttaaaagagaatagaactttattgttttcagatagtatatttaaattaactagaattttataaataaaatgaaatataaaaaatattattatatatggtagaaataatcgtagccctttcttcttataataagtagaaagggctctttaaaattattttttagctgtcgatttatcaagtgatggatatggaacaggcatatttaatgccaattgtgcatctttcactacatcaaaacgtagaactttattagctcctagttcatcaagtaatttactcagcggtccaccactttttacaacttgaacgttctttggaaaaagcttttgtccaaatgccaaagtattagactctacagaagtgctgtgccatttcccatctaccaattgatacatggtttttgtttcaatacgagattgtggtttcacagttttaatttctggcaatggcgcagctacacttaaatcaggtttaccatcagtattataaatatgagcttgaactgatttatcgccaattttcatatcaataggtgttaaccattttggtaattggtaaccatacacaccacgaacacgagcaatttctgtatttactggtaatgcgagtacatggccataatatttatggttacgcattgaactcaataattctgtggtattgaagtgatgagcaccaggttggcgtacaaccacagcaaccgaaacttcatcatatgggtcgacatcaccgactgcataagagaagaatgttaatgaaaccaaaccatagcctgggataggttgtaatggttcaagtggagcagggagttttgcttttattttagaaatcggagcaagcatcaagagttggatattgctagtacggtaataaaaattcggagaccatactttacccactctagtatctacaagtttttttgggatggtacggaaataatcaatatttccagctgcaggatcttttgcaacttcgtctagattcgggttcatacgaaaacgatcgtaatagccgccttttggaacattaactttataaggcccaaactctacaacagttgtttcctgtgaagtgcttgagtttgatggttgttgtacagaacttgagttagtctcaaccgcttgagctgaaaaactcaataataaacttacggataaagcagtaactgttcgagggagattaagcttgttgaacattgaaatgttcctcctatagaccatgtattaatgctaagattaaagtgaggttgaaggtcaagcttttttattagtattttaaactttatttaaaaagaaaattagaatataaaaaataaaagatatgattttttatgaattaaaaaagagaaccagaatataaaattctggttctctttttttaaaatattttaataaattaattaagagtgcttaaccgtttaacaacagcttcggcaatttctttactagattgagggttttgtccagtaataattctatcatctgatactacatatgaagtaaatggaagaaagccttgtttatatttagcgccatggttaattaagctattttgtaaggaaaatggaacttgagatttaattccagacaaagtttcttctttattagcgaacccagtaacagttctacctgaaatgagtggtttaccattttcacctaccaaaggtaataagcctcccacgccatgacaaaccgctgaaacgataccaccttggcggtaaatagtttcactaatattttttagttccttattatccgggaaatcccacattgttccatgtccacccgtataataaattgctttatagcgtgttggatcgatactacttggtgccaaagtgtggtttaagcgatacataaactgacgatctgctaaaagttttcgagctgatttatcaacgtaaataggcttcatactacgttcatcaagtggtacaactccaccttgaggactgacaaaatccatgtcatagccagcagctttagcgacatcataaaaatgagttaattcagtaagccataagccagttttatctgaacgagtcggataggctgaatgattggtcataacgactaaaattttacctttgcttttagccatttcttgattttgtacttggtcagatgcatttgcatagcttactgataaaaaagccataaaaaaggcaatcaaccaacgctgaaaactccaaactttagacacggtaagctcctcatatttacctattaggaatgctaagattaaagttaggtttaaggtcaagtttttttaaaaaatgaccgatgaatggaaaaatgattagtcagagattaggaagttaatgattcaggtaaattataaagaaagcatgatgacatgctttctttataagatttacattaattagcaccgcactaaattattatttcaaatgcttttgaagttcagatccagcttgtgataacgcagttttcacagatggttcgttgcttaatggatttaaaagaccatagtcatgaatcaaaccgttataacgagttacagtcactggaacacccgctttatctaagttacggccaaaagcttcaccttcatcacgtaatacatctaattcagctgtttgaattaatgtaggtgggaagtcttttaactgttcgcttgtagcacgaagtggtgatgccaaaatattgttgcgatcattggcattggttgtgtagttgtcccagaaccatttcatcatgttcttagtcaagaagtatcctttttcatactgattgtaagaagcattgtcgaaaccagcattggtaacaggccataacattacgttgtaacgcacttttggaccgccagattgtttaatctgaagagcaacagcagccaccatgttgccgccaacgctattacctactaaagctagacggctaccatcaacaccaatttctttaccatgtttagcgacccatttggttgcttcatatgactgattaattgctacagggaaatgagcttctggggaaggcgtatagttaacatatacagccgctgcaccagactcgcgaactaaatcacgaattaagcgttcatgagtagcaaagtcgcctaacacccaaccgccaccatggaagaacataaatacaggaagaacgcctttagcattttctggtttaacaatttttagttgaatgctttgaccatttatttgaattgttttctctgaaacttgtgctggcggaagttttgctcctttttgtgcaccgattaaaacttgacgagcttcgtttggagtcattaattccattggtttaccgttacccgaattgagtacgtctaggaatgcttgtacacccacagtcggagtaggagtattgatagcttcagctgaaacagctgtagtgaaaagagcagatgttaataaagctgttgcgattttcatggtgaaaactcactttaagttaaaaatttgaaatacaactttgagccaaggcttttcgtccaagatcaagctggttctatcgaaagctcagttcaataagtatcttgtgtatataatacttgcacgcaagatacttatggtcaagaattatttataataatttttagataattttattttttggtttaaatatgaaagaaaacaagatattaggtgataaactctgtttttcgctttattcagtagcgaatgcacttacgcggcagtatcgtccattacttaaagatttcgatttaacttaccctcagttcatcgttcttttagctctttacgaagaagatgatatttccctaaaagaactcagtgaaaagaccttatttgactcaggcaccttaacgccgttggttcaaaaacttgaagcaaaagagtttttgaagagggtatcaatcaaagaagatgagcgggtaaaaaaagtaatattgacggacaaagctttagagataaaagaaaaagtgattgatctacccaatcagttgcgatgttcaatgcatatgaatgatgaggagctgactatgctgagaaagctttctttgaaattattggaagatttataaagttttctttaactgaaaataatttttatctgcaaatagtttaaagctttaaactttaaaaaaagaggcatctgaaggcctcttttttacataaaaaattaatgaatacaactctttaaataggggaataataaaaggtattgacattaaagttagctttaatcttaaagtaaagccatactgaatgaggtcattccaatgaaagtgttcgaaaaattagtattcccaaatggctcatatgttcctaaccgtattgctaaagcagcaatggaagaaaacatggctgatttaaaccatgcaccatcagaagaattaatgcgtttatatcaggcttgggcaaatggtggcgtaggtctaatcattaccggaaatgtaatggtagaccgccgagcaatgactggaccgggcggcgtagtgcttgaagatgaaaagcatctagatacttttaaaaaatgggcacaaattgggcgctcaaaaggtgctcagatgtggcttcaaattaaccatccgggtcgccaaatgcaagccaatcttggtcagcagacgtgggcaccatccgctatttcacttgatcttggcaaaatgtcaaatcgcttcaacacgccaatcgaaatgactgaatctatgattgcagaagtgattcagcgttttgcaaacacggcgcgtttaggtgaaaaagcagggtttaccggtgtggaaattcatgcagcacatggttatttattaagtcagtttctttctccactgagtaataaacgccaagatcaatggggtggttctttagaaaaccgcgctcgcattttaattgagattgttgaagctgttcgtaaagtggtttcgcctcagtttactgttgcagtaaaactgaactcagccgatttccaacgtggtgggtttagcgctgaagatgctcaacaagtggttaaaatgttaaatgagcatgcagtcgatttggttgaactttcaggcggtagctatgaagcacctgcaatgcaaggtcaagcacgtgatggccgtacacttgctcgtgaagcttactttttagaatttgcgcaagagattcgtaaagttgccaaaatgcctgttatggtgacaggtgggatacgccgtaaacaagtggcagagaaagtgattgaaagtggtgtagatatggtcggtattgccacagctctagcaattgaacctaatttgccaaatgcttggaaacaaggccagaatcttactcctgagttaaaaccaattacttggaagaacaaaacacttgcttcacttgccaatatggctatggtcaaattccagttacgtaatttaagcgcaggtaaaaaaacaaaaccaaatgtttcaccagcttgggctttaattttgcaacaatcagctatgtcatgccgtactcgccaatacaaaaaaggcatgcgtgactattatttgcttcttaataagtgagttgtgttatgacaaatgcgaacgattcaaactggataatttatggagcaaatggctacacgggcgagttaatcgctcgtgaagctgtacgccaaggtctaaaaccaactttggctggtcgtaacaaagctaaggttgaagcacttgctcaagagttggggcttggttataaggcttttgggctcgataacgtggatgcggtaagtgaacaactcaaaggctttaaactgatcatgcactgtgcagggccattttccgcgacatcgaaacccatgatggaagcttgtataaaggcaggtgctcactatctagatattacgggcgaaatctcagtatttgagttggcacagtcacttaacagccaagccgaaaaagccgatgttgtgctttgtccaggtgttggttttgatgtgattccgacagattgcgttgccgctgcgctcaaagaagctctgccagatgcgacccatttggcgcttggttttgattcaaaaacagggctttcaccgggtacggcaaaaacaagtacagaaggtatggccgaaggcggcaaaattcgtaaaaacggaaaaattaccactgttccattagcacattatgtccgtactatcgatttcggtgatggtaaaaaaagtgctatgagcgttccgtggggagatgtatctacagcgttttatacaacgggtattccaaacattgaagtatttgttcctgcgcctcccaaaatgatttttggtgcgaaaatgatgaactgcttccgccctgtattaaaactcaatgccgtccaaaagtttattaaatcacgtattgaaaaaacggttgttggaccaaatgaggaactccgcgcgaaagtacccacctatgtttggggagaagcaagaaatacgcgtggggaaataaaaaccgcccgtatccaaacggaaaacgcttatagccttaccgtaaatgggtcattgactgtggtgaattatttactcaacaataccgttaaaggcggtacatatacacctgcaaaactgatgggttataagctagtgaccgagttaccgggttctggtccgttggtcattaattaaaagcttttattaaaacagcatgtttatagatcgtcccgaataaggagtcattcttgttcggggaatttataaatatttcaaaagaatacagtgcataagtataagaaaaacagaaaacaaaatactccataagaaatcatataaattgaatatactaaaaacgataaattttttataacaaaggaatgagaataatgagaaaactcatactatttctacatgcatcgcttgacagttttgttgaagggccaaatggggcaatggatataggttggattgcttacgatgccgatttggcaaatcatgcaaataaaatcttgaactctgctgatacggtaatttggggacgtgcgacatacaagatgatgcataattattggccaactatgctttcaaatccagaagcttcagagcatgaacgaaatcatgcagaatggattgaaaagacagagaaaatcgttttttcaaccacattagatacagttgaatggaataattcccgacttgtaaaagaccatgttgaagaagaaattaataaactcaaacagcaaccgggtaaggatatggtgattttgggtagtccacggttcgcgcactatctgatgcaacttggtttaattgatgaatataaaattacagtttcgcccgtgctgcttggtagtggcttgccactatttcaaggtattgagcaaaagaccagtcttaaactcattgaaaataaaacgtttgcttctggagctatcggtcttcactatcaaaagataagctgattttttctataacatgtatataaaaaaacgaattactgattaattctgtaattcgttttttaaatttatgaaatgctacttaatcgcttgaattacttggttgataacaatacgtatcgtagtttcaatgtgagaagccttaactcgttttgaacttaaaactagggtgtttttaccttgtcaaaatacagattcataagacgttctgcattttgctcacatgtaatttcatcaggtttgttgttgattgcatcaatcatggtatgtaagttttgcttactgatttttagcttttgttctaaaagctctatttcctgaattttggtttcaatcgtttgaataagggcatcatggtcccaaacagcaactttcgagggcaaaaatgctttaatttctgctaaagaaaacccgacttgctgagcttgctgaattaaagaaagttgtttcaaatcgttatcggtatattcacgatagccattcgatttccttttggctttgggtaagagtttgatttgctcgtaataacgaattgtaggggtacttaaaccacttagttttgataactcgctaatattcatagccacatactctcttgacattcaagctaactttagacttatagtaacataaaagcaaggttcataactttaccaagcacacgttttcagtaacaactttctatgctttgattgataaaagatagaactataaagaagaatgaggtgagaaaatgtctaaacgtatattacacatcgtgaccaatgtttcacgctataaggatgtagatcaacaaacaggactgtggttaggtgagctcacccatgcttatgatgagtttgaaaagcaaggctatatacaagatattgtcagcccaaatggtggaaaaactccaattgaaccaaaatcgcttgtgcctttggtggcggataaatctgttaaagaccgagaaaaagatcaagcttttattacgctgctggcaaatacttttaagccttccgacattaattggcaagactatgacgtgatctactatacgggtggtcatggtgtaatgtgggattttctagataaccctgaactgcaagaaatcaccaaaaatatttatgaaaaaggcggtattgtttcgagtgtttgtcatggctactgtggcttgctcaatgtcagactttcaaatggtgaaagacttataaaaggcaaaaagttaacaggctttgcatggagtgaagaagttttggcaggggtggcaaaaaaagtgccatataatgccgaagagttagcgaaagaatatggtgctcgttatgaaaaggcttttattccttttgcaccgtatgtcgttcaagacggtaagttaattacggggcaaaacccgttttcagctaaaaagacagctttagcgataatagaagagctagaaaagtcataatttaatgattcaaatataaaccctaaaagcaaaacagcgatgggcttgcttttagggttttaaataaatggattggtgtaaaaaattaagcttaaggaacaatcacaaaatcagggtttgctattgcaaaaactgcttcatggtctgcaactggtggataaatccaaacagtattaatttcctgtttaatttttttcgcttcttcacgcacaaattgaacttgtcgatcccaaccttcagtataaagtgcgccccaaggacccaagtcaacacaagtgacatactttggttggctgtatggatgaagtggtaaatcaaccaattctgccgcagcgttataacccgccacacggcctaagctcatagcatgctgacacgacatcacattaaaattgcctaaatcatcggttggaacttttacagtatcgccagtcacaaaaatgttttttgcttcaggtgcatgtaaataagcatccccaatcaaacggcctaaattatctttttcaccagcaatttgagaagtgagggggttagcccgcatgccggcagtccagatcacggtttctgtttcaattttttcgccgttagaaagcgttacgccagtggcatctagcgcagtaactcttagcccagctttaccttcaacaccgagttcgttaagggcctctcgaataacagtcgcagcttggtcacccattgccgcaccaatgtctgtcgaggaatcaaccaaaaccacacggacatcagtttcacctaaaatgctacgcaaacgttcaggcatttcggtcacggtttctaacccagtaagaccacccccagcaacaactacagtgttacgtgccgcatttgcaggtttatgggctaagtttttaagatgttggtccagtttttcagcatcttctaatgtatttacgctaaatccatattcttttagacctggtataggtggcataaaagtcgtacttccggttgccagaacaaaacggtcatagcttaaattttgcttgttgccatcggtggttgcaacttcgatagtttgttggttgacatcaattttatttacccaacctgccagaaatttaaccccaaccacgcttaataactctgaaatatcagggttcatgttttcaagcacagcttcataaagacgaggacgaatcccgacatttggactaggggaaaccatcatcacttcaatgttttgttcttgtgatgctaaatggattgctctttgtgcagcgagtgcagcccataaacctgcaaagccagaaccagcaataataatacgcttactcattggattatccttttgatcgatttttcggacaacacgttccagctcatcataaaatttagggtgagcgaatccattctctgattgtccgaaaaaatctgagaaggcgtttaaaacggattagggatgttttactttagtatttgagggttattagctcattagtcgggagtatcccgcgatattttacttttccgcatttttgctgttcttccttcaatgcgttcattgatccaaccatttacatcactaaaaaatacgtcaggggcataacggccaaaacggtctgcaatatcgccaagtgtatgagcacctaatgcgtctcgcatagctttttcggcttgtagcatgacagcatgtacggcacacacaccactggttgcccaatctggtggggcattgttaaagactgcacatttaccgcgaacttcttgacactcaaaaagcggtttttcagcttcgattgcattcacgatatctaaaaagctgatttcgtgagcagatcgagccagtaaatagccgccgcgaacaccttcttgagcaacaaccagacctgccttttcaagtttaggaaaaatcttggccataaaactcggagagactccttgtaattcagcaagatccttactactcaaaggtttatcttcattgttcacaagaaaaagaagacagtgaatcgcatactcgacgctactagtgatataagccatttaatttcataattgatcaactataaacacagactaatgtagtctgtgttttaagtcaataataaaactgagacaaagtttgtcctagttttatttggaagtggtattgaggctagatgtgtagggtatataactaaatttaaatacctttaaattgaaatttaataggataaataatttaaaaaattatcggaaaacttacgaacgccaccaataattttcaatatttggttcctctaagttcaataattcacccatttgcggtgtgctaatcgctaaattattttgttgagccaaagcgacgatacgttcaaaagggtcgtcccaagcatgaagtgccaagtcaaaagtaccgttgtgcacaggcaacaaatgacgtccttttaaatcgatatgagcttgtaaagtttgctctggttgcatatgaacatcgggccattcggggtcgtaagcaccagtttctaacatggtcagatcgaaaggaccgtaacgatgcccaatctctttaaaaccgtcaaaatatcccgtgtcaccgctaaaaaatacacgtaagtcattatcaataatcacccacgacgcccaaagcgtcgcattgctatcacccattccacggcctgaaaaatgatgggcaggggtagccaccagttcgagtccatctacatgtgtggtgtcccaccagtcgagctgctgaaccttttctgctggaattccccatttaataagggtgtcgcctacaccaagtggtgttaagaaatgctcaactttatcgttaagctgcatgaccgcatggtagtctagatggtcgtagtggttatgcgacaaaatcacgcctttaatgggtggtaagtttgcaatactaatcggtggttggtgaaaacgttttggaccaatccattgaaaaggtgaggcacgctccgaaaaaacagggtcggttaaccaaaactcattttgcagttttagtaaaatagttgagtggcccaaacgaaatagagagcggtcaggcgcacttaataattgttcttttgacaaacttagaacaggaatttctctgtctggaacggtatccttgggtttgttaaatagaaacttccacatgagttgaagcgttttgccaaaagaaggcttgtgttggtttggacgtgtatttctaaatttgccattgtgttgctgagatggcattaggggagaagataagtctgttgtatttgaaatagtcatcttatttttccttattggaacaaacctaatgggcaaataagaacttgaactaagtgcttatttcgattcatttaaatgagtatttactcactcattaatccattcaaaaataaggacgccgtgcatccttactttaatctatattgaaactgcatgccaaaatgcttcaaaaccagatttgcggtaacgctcggcttgagaagggtcttgggcaataaaattaagtgtaacttcggcaagcgcacctaaaattgaagcaataaataacggcgggtaatctcttaatttgccatcgttaatacgttcttgaatgttttgagtcaggtcacaaaaggtttgcataccaatttgtttactttgctcagtaatttgttccgatgttgaaagctgtgccatcactttacgtttaaggggagcttctaaactccagtccaaatagctttgccaaatgtgcgacatttgtgtttgcaggtcagcgttagtggggtaactaagcatcatcacctgacgtaactcagcctttagtgaaagatataattggttaagcagttcttctttattactaaaataggtaaataaagtaccttctgctacgccagcaactttggcaatttttgaggtagacgcacgctcgccaagctctgccaatgtttcgatagcagcgcttaaaattgcattacgtttatcttcactacgaggacgagccatatacaaataaaataattgagtgattactcaatcataaataaaaatggaaataatgcaagctaaataaaaagctcttaacgaaggggttttaataaaaaaattgacggtctttctttattttaaataaaagtacctccttaaaaggaggtacaaaagattaaaaatttaataatttaaattgatactaagccagcgcttgaagtcgatgaaaaaattctattttttcaacattacccatgccttctttttgaaagttttggatatgtggtccaaaattatgatgatgttcctgatctttttcactagcccaatgttcataaaatataaatagactaggatcattttgatcttggaataattcataagtgatacagccgctttctttgcgggatggagctaccacttcaataagatcacttctgacctgatcaatcttttctggttttgctcgaagtcccactactaaataaacagcactcattttaatgtgtatcctttgaatagggacaatacaaaacttttattcagctttgtcgtaagagaattggatacccgctgtaccaccagtctcaataaataatttcataaattgaggtacagtttctgagcgtttccaatcacgttgcagttcacagaataactgagcaacactgatcattttgccgcctgcttgttcaatacggcgtaaagcagcttcatgcgctgcaacagaagtaccacctacagcatctaccacaacatatacttcatatccttcagctagggcgtctagtgcaggaaatgttaagcaagcttcagtccaaagcgctgtcataatgagttttctacggcctgttgcttttacggcttctttaaattcggtatcttcccaagagttaatacttgtacggtcataggtagggtaatctttcaaaactttacttaattgtggaatcggtggtttatttaaaccagtcttaacatttacggttgaatggataattggcaaattataaacaatggcagcttttgccgtgcctacaatattattaatcaacagttgacgatccatcgaagcaatggagtttacttgaaccggttgataatcaatgacaataaaagcagagttttctggagttaaaagatgatcttgttttgggtcacggatgttttcactagtcatttttttcacctttattaaatataattaaataatacaaatattatttttgtgccataagtttggtcacttatgaactatataattaagtgagaaaggacggaactacacaaaattaggctaaagaatcctaaaattgaaacagtggtaattgcatgaaaacagatttaaatgatctttattattttgtaaaagttgtacaacatggagggtttgcttctgctagtcgcgaaattgatattccaaaatccaagttaagccgccgcattttattattagaagaaaggttaggggtaagattaatcaatagaaatactcgtcaatttgatgtaaccgagttaggacgagaatactatcatcaatgtcaaaatatgattttaggtgcagaagctgcacagcaagtcattgaaagaaatcaggcagaaccttgtggggtaataagagtcagttgcccgcctgcatggttatatgaccacattgcagatatgatttcaaaatttatgaggttgtatccccaagttaatattcatcttgaagtaaccaataagaatattgacctgttaaatgacggaatagatatcgcgttaagaattagatttccacccttggaagattccgatcaggtcatgaagatttttgcaaaaaatccgcaatgtatagtggggcattgtgagctggtccagcaacatggtatgcccgaaaccccattagatctatgtggttatccttcaattgggttaggtaactcggaacaaaaaagtatatggacactatacagccgagagaatggtaaaatcgaaaaagttatacatacaccacgtttgattgtgaacgacatgattggtgtacgagatgcggtattaagaggagttgggattgctcaattaccttttgccctgatttataaagaaattgagcgtggtgaattaattaatttaatgccaaattgggaattaaaaaatagtattatgcatgcagtttacccctcgcgaaaaggactattgccaagcgttcgagcactattagattttttatcggaggagttcgaaacacttattaatgaaagacccggttttgaataatattcaaggcaagtgaatttgttcttaatgagatttggtcttcaactcaagattaagtcatttttgagatagtgtgtctcattaatatggattttattcggtttttgataatttcataataatgaaagtttaactacagactaaagtgctaaaaacgaaagcattaactttgaatacggtgaaaattatgaataaacacttattactaaacattgcttttttaggttcggtccagctttttacaatgtctaatgcattggctgatgttcccttaactccagcgcaatttgcaaaagcaaaaactgaaaattttgaaaagaaggttcttttatcaaatttaaataaacctcatgctttagtctggggaccggataaccagatttggttgactgaacttgtgacaggcaaaatcttacgagtaaatccagaaacaggtgcagttaaaacagtatttcaagtacctggtattattaatgatccgcatgcacaaaacggcttgttaggttttgcatttcatcctgattttaaaaataacccatatatttatatctctggaacttttaaaaatcctcaggcaacagacaagaactctccaaatcagacaattattagaagatacatctataataaatcaacagataccttgcaaaacccagttgatttattagcagggttaccttcttctaaagaccatcaggctggtcgtttagtgattggaccggaccataagatttattacactttgggtgaccaaggccataaccagttaacgtatttgtttgagcctaactatgcccaaagtcttccaacccaacaagaattaaagaataaagacttccatgcctattctggtaaagtcctgcgtttaaatttggatggtagtattcctcgtgataacccaagttttaatggtgttacaagtcatgtttacacattaggtcatcgtaacccacaaggtttggcatttgcaccaaatggtaagctcttacaagctgagcaaggcccaaattctgacgatgaaattaatttggttgttaagggggggaactacggttggcctaatgtagcaggctataaagatgacagtggttatgcctatgcaaactattcagccgcaaccaataaatctcaaattaaagatttaggacaaaacggcataaaagtagcggcgggtgttccagtaacaaaagagtctgaatggactggtaaaaactttattgcacctttaaagaccttatttaccgttcaggatacttataactataacgacccgatgtgtggcgatatgacttatatttgctggccaacggtagctccatcttcggcttatgtttatacgggcggtaaaaaagcaattccaggttgggaaaatactttgcttgttccatctttaaaacgtggggttattttccgtattaagatggatcagacatatagcacgacctatgatgatgctattccgatgttcaagagtaacaatcgctatcgtgatgttattgcaaatcctgaagggaatactttatatgtcttaactgatccggaaggtaatgttcaaaaagatgatggttccgttacaaaccaattggaaaacccaggggctttaattaagtttacctataaagctaagtaaaataatgacaagaatctaaaggtattcctttagattcttttgtatatctatataaggttattggtctttttaactagttgtagagggtgcctaataatatttaaaaagtactttttataagttactaagaatgaaaggcgtgcttttttatataggaaattacgtttaatttacagtaaggagagggtgagaatttaaataaatacaaaaagataaatcaaaagatgagtagtatatgagttcagaagcacattcaattagcttgattgcccctgtagttttattggcggccgcggtaattgcagtccctatttttaaacgtattggtttaggttcggtattaggttatctcattgcgggtctgattattggccctttcggttttgcatttttccaagattctaccgcaatcttacatattgccgagttgggcattgtgatgtacctatttgtgattggtcttgaaatgcagccatcacatttatggagtctacgacgggaaatttttgggctaggaacactacaaatcataagctgtgctgtggcattaacaggcgtaggtttgctatttggttttacgtggcaagttgcttttatcggcgcagcagggtttgtattaacatcgactgctattgtgatgcaactactgggcgatcgtggtgacttaactcagcctcgcgggcaaaaaattgtagccatcttattatttgaagatttattgatagtgccattactggctattgttgcttttatggcaccgaatcatgtggtcgaaagcacagcggtacgtttagaaaatataggaattggtttattagctattgcgggtctgattgcagcagggcattggttacttaatccattatttagaatcttggctgccgctaaagcaagagaagtgatgaccgctgccgctttgctggtggtattgggtgcggcattgctcatgcaagtgagcggtttgactatggcaatgggcgctttcttggctggtgtgttgctatctgaatctacctttaggcatcaaattgaagctgatattgaacctttccgtggaatcctgttaggcctctttttccttggggttggcatgtcactggacttatcagtggttgctcaaaactggcagcttattgtaagtagcgtaattgctctcatgtttgctaaagccatcatgatttatatggtcgcgcgagtaactaagagttctcatactgaggccttagatcgtgccttattgatggctcaaggtggcgagtttgcctttgtacttttctctgccgcattaagtgaacaagtcattgatagtactattaaatcaaacctgactgctattgttgtactttcaatggtgttaacccccattgtaggtattatttttaagcgttttactcaatctaaggcgagtgtttcattagaaaacatcaatattgccgagggtttaactggtaatgttttaatgatcggtttcgggcgatttgggcaggtaaccagtcaattattgttggcaagaggagtagacgtcaccattattgataataataccgacatgattcgaaatgctgaaagatttggttttaaaatttattatggcgatggttgccgtttagatattctacatgcgtctggagccgcaactgcacaagcaattgtagtatgtgtagatagtaaagaaactaccaatagaattgtagaactcgtgactcatgaatttccgttggcaaaattattagttcgttcatatgatcgtgagcattcactacatttagtcaaacaaaaagtagactacatgattcgtgaaacttttgagtctgccattaaatttgggggcgttattttacaagaactaggtgtagatgaagacgaggtagagcgaattaccgaagaaattcgagatttggacaatgagcgttttgaaactgaaattgccgccgatgatgtatatgccggagcggatatgcaatatacgcatgcacatcatccgagaccaacagcaccattaattcggccaaaacaggaagggcgtattttaaataaagatgatgcttcggataatgaaaatatggatgggtaaacgctccaaaatttttaggtgaaaatctggaggttaaagagttgttaacgacactcatggctataaggaatccggtcgattcttttttgtaaaattgacggattcactacgctttcatacatttgtcggtacgttaaacgatgatcttcattattatgatagttaattagttcgagtaacttaagcctatattctttatgaccagcgtggtacattgccgcataatttccccataatgcatattggtaccataactgtgctttaggaattagatttatttcgtttaaatagctggacgcagttttttcataacattgctttataagtgatatatcttttttcatcctttttaagaaaatacattgcgtttcttgaagcttggaattattagctttcgttaacattttttctgtaatgacataagcttgttcaaggcaacctagacgaataaggattttccttttagtttttaaaatggctaaattatcttcattagatggcatggtatttaataatttttttaattttaaattgatcgatttttggtcactgttgttaggtaagttataaataatattgttgtattcataaatatatttattagctgttagttggtgtttcggcatatattcctgattatttatagttaatgcagaatcctcactagttttattgcaagcaaccagacctatactaataaaagaaagtgctaaaaatttatacattacaattttacctattttattagttaagagattaattaataacattaaaaaataggtatcaatattgtataattttttactatatattcatatagaatatagctgttttgataaaatcaatttaatattgtttttcttgtaatttattgtttttatgcattgtttttataattttaattatgatttataaatagaaatctaatatttttatattaatcgctcacacccatataaaatgagtgaagcgattaactaataaaaattatttcttatcatctctccaagctttttgtacctgactagcgatagcaggataatccataacaaaacgtatatgagactcaacacctgtttttaaggttgcatcatctacaataaattctggactatggttaggagctgctttactcatatcttgatttttaggagtcgctccgagtgaaatataaagcgagggcataagcttgccatagtgtgcaaagtcgtcacttgcacttgcattagtctccatacgatgcaaattatttttaccaaccgtgttttctaatgtaggcaaaattaattgagttaacattttattgttataagttacaggtgcataaggcgagagttcaatctcagcttttacattgtttgcaagcgcagtatgagtgaccatttcaggcaattgttgaagaatattttgacggatatcttcgttattggtacgaatagtaccttccatatcaacttctttcggaataatgttggccgcagttccgccggaaatatgtcctaccgttatcacggccatacctttagtaagatcagaacggcgactgatcatcgtttgaatattattaataatggcagcagatgccacaattggatctcgaccagcccatggcatggaagcatgcacttgctgtccagtcagtttaatgcggaattcatcagcactgttaagcatagcttcatctttatagaaaatgctgccacttggaatacctgaaacgacatggataccaaacatgacttcaggttctggctttttaagtgcgccgtctgtaatcatttttcttgagccgatttggtcaccttggctaaaaccagccaaatcagcagctccttcttcagaaggttggaaaacaaaaacaacagtgcccgcgaatctattcttgttttctgcaagtatttttgctgcacctaatagcatagccgtatgtgcgtcatgaccgcatgcatgcataacaggttgtaactcaccctgatattgtgcttttactttgcttgcataactcaaatttgttttttcttcgatgggcaaggcatccatgtctgctcttaatgccataacgggaccaggcagatcgccttttaagattccaataacaccagtttttgcaaaaccttttcgaacttcgatcccataagacttcaactcattttgcactaattttgaagtgttgaactccatgttcccaagttctggatgctcatgaatataatggcgaatttgaatagtttttgattcatttttagaaacagagtctttaatccaatcggcaaaacttgtctgggcggtaatgagtaagggtgtcaccaacaacagtttatgaaatcctttcatcgtcttttcgaaagatttattaaataaacaatccatgttttgcctcaatagtcagttcttatttagaggagaacaaacggacaaaatgcccggttctcaatattaaattttgtgataaagcgtatttggcgttatggctatgcatggttcatatgtatattcacaacctaacatgtatatacaactttatgcatataaaaatagcttatctaataaaaaaaatgcaatatttatctaatacttcttaatcatttttattaagttaagcttataggcgtataaggggacttggcgtatacaacatttgaaaaaaatagaggcggagcttgtacttataaaacagtgttcaatattactttatataatgtttagacaaagtacctaatacaatgaaaaacaataattaattaaataatttctagccaatttcacattgacagctcaaatattgaagattaccatttgcgggctggcctacattgccagtcggttttgacggaccgatgattcgaccacatcaggattatttcttctgaggagtagtcttgtgtgcacccccgttccctcccgtagcggtaggacgggagtgggacaccttcgggtgtgctggatgtcgaacccagtccgtcaacctgcttccgttctgccaccataatttataatgctttggcagaactcccaaaagaaggagttggctatgcacgttcataaattatcggcagtcactgtcaaaatctatctcgacacaacttaaaattttaaagcagtttgatgagccataggcttttcaggctttaaatcattacgtctaaaacttagcaacaataaaacttgagatgtgccaagcacagtctttacggctttgctgtgcctttttttctcccagaaaaggcacaggctttttaatcccttttagaaacaacaagaatttataacggtaaaactatgcaaaatttaaaaacttcttccaaaaaattacaggttattcatactgccatacgtctatttgttacttatggttttcatacgacgggtgtagacctaattattaaagaagccaaaataaccaaggcgactttttataattactttcactcaaaagaacggttaattgaaatgtgcattgcttttcaaaaaagcctgctgaaagaagaagtacttgccattatttactcaagtcgttaccgcacttcaaaggacaaactcaaagaaattattaacttacacgttaaatttaatagcttatattaccttttgcttaaagccttttttgaaattaaacatatgtatgcgagcgcttaccgtatggcggttgagtatagaaaatggctacttcatgagatttttgacctcatttttagtttagaaactcatgcattaaaacccgatgccaatttggttttaaacctaattgatggcttgatgttccagattttaagctcaaagagtttggaagagagggatgtggtggtggagatgtttctgaaaatttaattatttgattttcatctaaattattaagtttttatgtagaataagttaataattgaagaagaagtttctttgacagatttgttcggaagttagcaaaatcattcctaatacacacttaaaataggctcaagcagtataaatattaataattactggaaatctcatattacataaacatagagaaaaattgaataatatgtttttttgtgtaaaataaagttcttatacgtacaattctgtatatgtgatgttaactaagaactttataacttcttctattattctttttgcgggttttcaccaatatgtttatgcgattgaagatgtctctttacccagtcaggtattgcaagatcagcgtttaaaagagctcaaccagcaattacaagaccagcttgctcagcaaactccttatcaaaacaccaagccattacaggactttaagcatctggttgttgaagaaagcccatgcgtaacggttaaagaaattagtcttatccctttaattggtcagtcggaatctgacttacagcaatttaactttgtgattaaggccataaaaaaacacccacagaatattttgggtaaatgtattggtacccaaagtttgcataacattgtgaactatgcccaaaacgaacttttaaaaaaaggttttattaccagtcaaattgtcgtgagtccgcaagacttaaatcatgggaatctaaacctgagtatacaaatcggacgcttaaataagattgttatacaagaaggaaaaatttcctcattacagcttaagactgggttgccatttaaagctggcgacattgtgaacctaaaaaggctcgatcaggggctggaaaatctaaaacgtgtctatgcggtagatatgcaaattactcccgcaactgctcaagataaagaattaacgggctatagcgatttaatactcaaacttcaagcactacaaaaagttaatttcaatttaagtgtagatgactcgggtaatcaggacactggtacctatatggggaatattgggataggtatcaataacccgtttcatttaaatgatattttatcgttaaatgtgagtcactctttagatgactttcatgaaagcttaaaccgaagttatttcattagttatcagttgcctgttggttattatgatttaggttttagctataacgattatcaatatagacaaggaactgtagcacctgaatctggctatccagttatttatcatggtaatagccaacaagccaacctgaatttatctcgtgtgattagccgtagcggacaacataaaaccagcgtgtatggaaagctttatcataaagaaagccaaagttttttaaatgatattgaaattaatgtcttacaccgtaaaacctcaggctggaatttaggcgttcaacaccgtcaatatttaggaaatgcggtattagacggcagcatcgattaccgtcgtgggatgggggtgggtgcccgaactgcaccagaagaaaatattaccgatgtttacggaaaccatcttcctgttgaaggttactcccgtgctccactttggagtgcagatctgcgttataccacaccattccttttgcttgataaacctgcccagtaccgacttaactggcgtggacaatatgcaccgaaaattttagtacccaatgaccgcttttatattggtgggcgctatagcgtgcgtggctttgatggtgagctcatgctttccggagataacgggcagtatgtacagcaagaaatcagcttgaatgcaccaattcctaatacccagttttatatggcagtcgatcagggctgggtaaatggccgcaatagcataccgggtcagcgttatttactcggaagtgttttggggctgcgcacctatcaaaatagtttttatctggatgcctttacaggtcgggggctgattgcacctgacagcataaagaaagactgggttaccggttttagtatcaacctttcttattaatttactttagaaaagactttattcatgaacaagaatagttatcgcattatttatagcaaagcacgtcaaatgtttgtggccgtggctgaaaatgtacgaagccaaaccaagacttctggtcaaagtgaagcaagtacccagaacaatattgataacactgaatctcaggcatttcatcaactctggcaagtgaaggcactggttgctagtataagtttgtggatgcctttagcacctgtttatgcgggtattgtagcggacagtgccgcaaatgctgcgaatagagcagtgattggtgctggtaagaactcagcaggtacagtcgttcctgtagttaatattcaaactccgaaaaatggtatatcccataatatttataaacagtttgatgtattggctgaaggtgcagtactcaataacagccgtcagggtgctacgacaaaaacagttggaaatgttgcggccaacccatttttagccacaggcgaagcgcgagttattttaaatgaagtaaattcatcagccgcttcacgctttgaggggaacttggaagtcgcagggcaaatggcagatgtgattattgctaacccatctggtatcaacattaaaggtggtggctttattaatgccaacaaggcaatttttaccacaggtaaacctcagttaaatgctgatggcagtatcaaacagtttacggttgaccaaggaaaaattacggtttcagcaaaccctaattctaaatttggcttggggggaaataataacgatgcaaactatgtggatctctatgcgcgtgcattagaactcagtgcggaacttcgtgccaaaaatgatattcaggtgattgccggggcaaataatgtcagtgcagatttacaggatgttacacctaaaacaggtactggaactgcaccgacattggcggtagatgttaaagcgctgggtggcatgtatgccaataatatttacttgatgggaactgaaaaaggcttaggcgtgacgaacgcagggactattcaggcagtcaacaatctggtgattaccagtgccggaaagattgaacacagtggcacaatcagttcgaccagtaaaacccaaggtttagtgaacatacaaacaacgggtacgggtacagctgccgatatcaactcatcaggcagtattaacagtaatagtgccttaaatatcgattcaggtaataacctgaatgtaaatgctaaagaaattattattaataacggcagcctagcatcttcacctctaattgttaatgccaaaggtaatatcaatctggcagcagatacccgcattatggatgactcacaaggtggtgatgtctatatcgatgcagcaaatatcaatcttgcagcgggatcggaactcaaaagtaaccgtggtacagcaaccatacaagtgcaaaaagacttggtcgcagccaaaggcgcaaaactgattgctgccaaagatttaaatgttttaagtaatggtaagttatcacttacagagaaccatatacaggcatcattaggttcaatcaacttacaagcagattcagccaatacccaaaatatcattgaccttcaaggcgggacgatttatgcgggtaaagatttaaacctgtatagttcaggagatttaaatctaaagaatcttggattttcacttgaaaacgctgcaacaagagttaaaaacattaaagcctacagtggacgtgatctggtctggaacaatgctgacaaggcacttccccttattacaggcatggttcagcttgatgcagccaataatttaaccgttacggcaaaagaaatctcgaataaagacagtattcaactacatgccaatcaaatagcactcaatagtgcattgacctcacaaaagaatattgatgtgagttctgaaattgctgatcttgttttaagtcaggcactcaaggctcaaggtgatattaatctaaccgcacttgctggtggagttactgcaaatagcttaaaggccacatcttcggctggaaagatttctatactcgcgaataaaaatataaatttaaactcgacccagacaagcaaggcgatgccttcagctgataaagatgaattaacaactgatcagacggttattagtggcttaaaaggggtaacacttggctcgattggtgatggcatcgttaacttgcaatcggtacaagttaatgcaagtcagggcgatatattagtttcgagtaataatggaataaatttaaaagctaataatgatgtagttgttactggggatacgggccgatttaaaacggtaaataatgttttaaaaggacaaactgtttcgatagaaaatagtaaatcggatattaaaatccaaaatacagacctcagctctacggttggtaaacttgcgatcaatagtcgagcgggcatgagtacaattatcgacagcgtattaacgtcaaaaggtaatactgaactctacgcaaaagatttactgactttacagggcgtgaatgctacttcagaccagcatctggcagtaagctctggtcgtacggtttatagcaatgctgagtatacgccagcgaccaaatggattgcggataaagtcactaacttaacatctaagggtgtgacctctgtaacggctacaggaaaccaagtattacaaaatacaaatttaaccggtggagccgttttattagaggcgggtggttttattttaggccagactggattgaacttaaatgcggtcggaagtgatttacttaagaatgatacaaagttaaatagtttaaatggtgacctaactattcaaacaaattctaacttaacgattgatccaaaagcttacagcttaaaggctgttggtgatattgagcttgtttctaaaactggtactttgaccttaaaaggctatggtggtactgcggggaatggatcggaacaagtcgttaatttggatacagccaatggtagtatcaatttagagggtgctaaagttgatattcaaggttcacaattaaccgcgcaaaaagatattaagatcgtttcaagtaaagatgatgtgctgattgatggggtaaaaaataaattttctggtttacaaaaattaaatttagctcaagattattctctagaattagataggctaaataaagaacgtttaaagttgcaatcacaagaatattttaatgatttttctaatatgcaaaagaaatatcaatattataatcaagtacttaataaatattgggatcgtagtactttagatcaaagtaaaaatgaaaatgcagtactttgggttaatgcatataatgactatcataaaaattataatgaatttaaaaataagtatatggtgaaaataaattatccaattcttggagaaccccctatattaattaacttaatggatggttctccattttcggcagattacgtttttagttttaaatatgatgataactatcttaatgatgtcaaaaggaatgagctattttacaaatcaaacctaaatggttctgaacattctgaaactaaattgaactcaaaaaatggaaatataaatgttacctctgctaagggtttatctattagtggtggaaatatttctgctcaattgggacaggtgaatttagaagcaagtggtattttagccgaacaatataaatctacaaccattactgagtctaatccacagccaagaatattaaatgcgagtattattattgatggccatacagatttctatgataaagggaatgaaaatgatgataattatagtatgcgaacgttagtcagtcctaccattattaatggtgataaaggggttaacataagaactgtaggtaaaactaaagatgataatctagtcttacaagccacaggtattacatcaaaaaatggtgacgtaaaaatagaatcaaataaaagtattttatttgatgccgcagttgaacaaagttatgaccgtacaacaactactgaaaagaaaaaatcatggggaggtctaaagaaaaaatatattacgactgtagctgagaacaatgatacgaatgcagcttcagttgatatttctggaaaaaatatttttattgaaacgaaaaaactagatccatctgtagatgttaaaaatccagataataatattgatatttattcggggcgttttactgctgatggtggaaaaattacgattaattctggggggaatcttaacttttatacagtcgaagagagttctgatagtaatgtagatattacaaaaaaatcaacgtttgctggaattaaatacaatacttctaaaactaatgcaactcgtacgcaggttactgaattacctgcaacattaaaggcagattacattggtactaaatctggatttgatacccgacttgttggaaccgagtttgaatatttaaaagacgcaactatagaagctggtggtaagttagacttcattgctgcgaaaacatctattactgacctagttaaaaaagaaaagaattctgtagtctggcagtcaatgcaagataaaggctcaattactgaaactgctcagctaccaagttttaatgggccagttttacctacctttaaagcggcaggtggtttgagtgtacaagttccaattagtgaaaaagacgctaataaagttgagttgcgggatgaaattctaaaactggctaatcagccaggaaatgcatatcttaaagaattagttaaccgaaaagatgttgattggcaaacagttttattaactcaaaaagattgggattataaatcacaagggttaacggcggctggtgctgctcttattgtcattattgtaacgattgctacgatgggttcaggaactgctgcggctgcaggagctgctggtggaacagcagcaagtgggactacagttggtttgggtgcaagtatgattggctctgctggtataacgacaactgcggctggagcaattgttccatctacccttggtgctatggcaaatgctgcaattacaagtttagcaactcaagcaagtgtaggattgattaacaacggcggagatatcggcaaaacactaaaagatttaggaagtaaagattctattaagaatttagcggcatctgttgttactgctggtttaatgagccaagttggttctgcattaaatttaaaaccagatagcactcttctaccagaccgactagctaataattttgcatcatcagtaggatcaactttagtacaaactgcgattaaagggggagatctcggagataatttacaagttgcattactagcaggtttagctggagcattacaaggcgaattagctcaaaatctcaaaggtctggaagatgtaaactatattttacataaaattgctcatgcagcagttggatgtgcagcggcagctgctacaaaacagagctgcgaagctggagcgattggtgctggtgttggcgaaattattgcacaagaaatgcttcatggccgaaatccaacattcgtttcagcagaagagaaagctaaaattgaagcttatagtaagttaattgctggtacaatttccgcttatgctgggtatgatgttaatacagctgcaaatagtgcaactatagcaattcaaaataatgcttttaaggataaagcattattaaaacttgaagctacacgtaaatatttggatgataagtctaaagctgctttagatggcttaattaatgcatataaaaaaggtgatatagaagctgctaaaaaatttaaaaaccaattagatgattcagtaacaacttgggctaattcaagtagtagttatttaaatatagaaacaaaatctgccttaggtgagatcgttattgttgttagtgacttagttattcctactaattatgtagaaattttgccagttggtaaactttcaaaagtcgctaaaatattaaaaattggtgaggatggaactaagtctgctgggcgtttagcagaagagcttgcagagttacaaaaagttgatattaaatttggtaaaacattacctggcgctaaagcacctatcactgttacagctgaatcaaatataggtggtaagcatatgttcgataccaatcaaactgctagaccagaggttaatcgaacaaatacaccaactcttgctgctggaaatgcaaaaatagatccaagtaaccctaatttaacaatgaaaaatgcacatgcggaaattgccttaattcaaagagcatacgatgctggtttaacaaaaggagaaactatgcaggtgcttgttagaggaaaagaagtatgtgaccattgtgggcaagtaatgaaaactatgtatgagcgttcaggattatctaaattgattattcatgatacaacaagtggtactactactacttattataaagttattgatgctaaaactaaaattgctacaactaaaattgaagtagctccaatttttggtcattaaggttattgtttagaggttgctaatgattttatatgtttgtagttatgttgtaagaaatccttttttttctgagaaaagaattgatgtgaaaaaaatgggttggggaaaactatcaaatataatcaaggatattttttcttttggaggtagtgtcattattcataaaacagatgctgattattctgaagagtctgggagattagcatatgatgatatcgatagttacagtatggtttgtgattctagatacggttatttgtttggatgcagtattagtgaaaatgaagaatatcctgaaggtatttatttgcgccttgtgaatagaaaagctaaaaatcctgaagaagtttatatttttgagccacatgaagatgaatggcaagcaaaatatgttaatcaagatttagaattggcattaaaattatttaaagatatttatgaacatggcgaattatcatttgagtcaaaaacaatatttgagtaattaaattattgttttattcagcatttaacggtgtaaagattagatatataattaaaaaaccagcgctacttagctggtttttttaattgctacctgtttatatctatctatcaaaactaaaaatagaaaaactgatctttataatcttcaaaatctaaatcactttttgaacccaatgagccttcgataaagttggtatttgttcccaaataaaacgcaatcagggtaccaataaaggaatgcataacggtaaaagagaaagctcccaaagatgagacttttttcttacatattgcttaaaaaatatacagaaacctctctaaaccgagttggaacgctacaaacgcgaatgatattttaaactccactcttcccaataagtgaggtgagctatgaaattgttagctttgattagtatgggagttgcagcgagttattggtataaaactataaaaaatagcaagccaactcttctgaaacctaattttgatgaaatagtaaaaaactttgtattagcagaatttaaagcctaatgcatttgataatcttaattaaataaaaagctcatcggaagatgggcttttttgttggagtaaaaacagacaagcttatagttttcatataaaaataagaaaatattgatccatcttagcttctatatatttgttataaattaaaaaagagaccatcaatgggtctcttttgattaaatcttttatttctaaaacctaaaccaacttttgaaccttttgcgcttttggcaatgtcggttttcttcccaaatacaacgcaatcatggcacccgtaaatgtaagcatacataacggtaaaagagaaatagggaagcttcccgaataatcttttacaatacccataatagagttcataagcccagtaccaatatgcgcaatcgtattcaccgctgcaatacctacagccactaaagtaggtggtaagcgctcagaaaccaatgcccagaaaggacctttaatggcatagttacccatcaaaacgagtgagaataaaattaagctcaaggttaaagatgaagtaaaaatagtaagaagcaaaccaaaactggtcacaaataacggaatagctgtgttgagactcttatttccacttttatcggcatgtacgccccaaacaatcatgaaagcggcagctaaaccaaacggaatcatatttaaaagacctgtctgcatggcagttaaatggaaggcttttaaaatctgaggcatccataacgataaaatattgctggttgctgaacttcctgcataaataattgcaaagaaccataaatatttattggtaatcagcaatttgaacttactctttttctgttcggcactgtcttgtttttcagagttcaacaattgatttttttcaaaagttaaagtgcttgataaccactccttttcttcttgatttaaccatttcacattgttcgcggtattcggcagccataccaggcacaacaaaccaagaaggattgcaggtaatgcttcaagaattaaaagcacttgccatccacttaaacctagtaaaccatgcaagcctaacagtaaggcagataacggtgacccgataaagttagataaaggaatggcaaccataaatacggcaacaattcgagccatatatcgtttagggaaccatagtgttaaatacagtaatacgcctgggaaaaaaccggcttctgcagcaccaagcaaaaaccgtgaaattgcgtatgaaatcgggccggtaatgaaggcggtacagcaacccacaattccccaagtaatcatgattctggcaatccagatacgtgcacctagcttttccattgccatgttacttggaatttcaaatatgacatatgcaataaaaaataatgtcgcaccaaaaccaaaggcagtagcagttaaaccaatttcttggttcatggttaaagcggcgaaaccaatattcacccgatcaatatatgcgatgaaataacaaagaatgaggaaaggaagaatacgaaaagaaagtttacggatcgttgacttttctacttccgatatagatatatcatttttcatacatactccttatgtacgtgagaaaccaaacagctcggtagggttctgatttaaaattaaacattgctcgtgtttatcaaacacaatctgtttaaaagctttaatcgcatcttcataagttattaaggattcatgttgggtatgcggccaatcgcttccccaaatgagtttttgcaaaaaacctttttctttaaaaatgttatatgcctgttgggctatatttatattgttgggtgtagcacccaaacgatagaaaccggatactttaatccagtgctgttttacgttaagtaagcttaaaaatttctgataatctggatcttcaatccctttaacagggtcaactcggccaaaatggtcaattacgacatcaaagctgtattcatccaattgtggcaaaagctgaaccagatatttcggcggtgcgtgtatctcaacttgccagttgaggctttctacatttcgtaaaaatttttgccagtcaggcgtatttagcgcaggagggttaagaccgaatagatttaagcgaacaccaacgattccttgtgccttgagattcactagctcattaaaagtcgtcgtatgttgaacaacggcgatcccttttaaacgctcagggtattgctgaattgcgtttaacatcgcttggttattggtacccaaaaagctgggttgaaccaaaacaccatgcgtgaaattgtgttcatcaagatgagagataaaactttgtacagttgcctcataatcaggtgcataacgtgctgtttcgatactgtggtcctgtgtcgaaaaaacatgtgcatgtgtatctatacagttcattttcatctcacattacaaattttaaagcgaaaatagcgattaaagcggcaatgactcctacaggaattgctttaaataacagttgattaaagaatttggttttgtcgatgtctgctggtgctgaagccataatgaggctaccgccagaggagaaaggagaaatcgctgtagactgagcgccaaccacaatacaaatgaacagcactagtgggtttaggccagaggtaagtgctagcgccggaacaattgggaataaggtaggagcaactacgccgagagtgcttgaaaatacagacataatggcactgatgagacataaaagtactggaatgacccacacaggaacattgtttgctaaccattcagaaagggtagtaataatgccaagcttcacacctaatgcgatgagcataccgacaccgcaaatcatgatcagtgttccccaaggcacaagtgcaatgacctttttctcatcggcaagtttcataagtaaactaatgagcgagaaggtaatggcaaggaaggcaatatcaattttggagtttaaaaagctaatcgtttttacatcgggaaaaacaagatgcaagattggaaaaactaaaacaatcgacatcattaaaataataaggaagatggattgtttctgttttttgtcgaatggttcaggcttttgatcttcaatcacaattgaattactttttctattccacagggtgtaaattcccaacaccgcaattggaataattaaagttaagacaaaaattccactactatatgaaaaagctgtttgcgaggtaatgccagtattttccattaagcttcggaaaataatgccactttgcgatgtcataaaatttgcgccagctaaagcgccgtaatttgcagccatcccaccaataatcatattcatattggtttttttacacagcagcagtgtaatcggtgccataaaggcaagtactgtataaaaaccagcacctaggccagcaataatggttgctgcgaaaaaaatcgctaaaggtaaaaactgaggaaacttacggcatttatatagaagatggctggcaagcttctctagtgcgccatttgccaaagcaaagttataaaacagagtgacagataaaataataaagaaaattttgacaggccataattcaataacttcggaaggtttaagacccatgccaaagcaaccaatcaggtaggcaaacgctatcgtaaaaaatccgatattaattttcgttttataacctaaacctatcgatacggctaaagccatcagcatcaatgcagtcatattatcttccttgataaatatataaacatctaaacatatatatgtttggttttttgtattacatagaactatgctagtattgtcaaatcgatttcataatgtttaacgcaaatgcttgatgagactgcatttaaaaattttaaattgccaagatatgaaaaggtccgttgggaacttcaaaaactactgatccagtcaaaatggacagtcgaagagcctattccaagtgaacaagagcttgcgcaaatgtatagcgtatcggtaggaaccgttagaaaggcggttgaaggactggttgaagatggcttattagttaaaaagcaaggaaaaggaactttcctcaaacaacctaattttgaaaattcgctcattcgtttttttagattacgtaataaaaaaggcgagttcattcagccacaaggacaaattaaaaaagtagaagtgtgtgatgcaatatcggaagtaaacgccgagttaggacttgggcacactgaaaagttgctttatatcgaacgtgtccgtaagcatgaagatgtcgttgtattaagtgagagaatctggctgcctgaacgcttatttaaaaatctggaagaaattccaatcgctgagtttggtaacttactttatcctttttattatcagcattgtggccaatttatttcttctgcaacagaacggttaacttttgagaaaaatattaaagatagctatttaaataatcaccttgaagaccctttagtgaaggtatgccgtattgcaaaaaatcttgaaggtgtagcggtcgaataccgtgagtcttatggtttggctgataattttcattatgaaataacaattaattaattcttgatgcagcttaataaagatttccttattgagctgcagagctggttcactaccgtttatgttaagtatttcttgtaggaagtgagtcattaccccataaatcgagcatcggctattccttgaatgcctagcccataaatggcaaaaacactaccacgcaattggttgtcattagggaaccttggaagtggtggttgcgacatagatgtaacaaacaagacatcaagattttttccaccaaaaactgcactggtaattttttttacaggcatttcaataatacggtcgatttgtccatcaggacgataacgtactaactgacccgaatatacttttgcattccataaataaccttcacgatctactgtcgagccatctgctgaaccaccgtctgaggtatctatcttacaaaaaatagttttatttgagatttggcctgtttcaagatcataatcataagaccagatttcaccttgccatgtatctgcaaaatagagcttagtaccatcaggactccagcaaatactatttgaagtattaatattattttctaatttttctattttatagtctgcatctaatcgataaagagatgcggtattcccatcttcaaggcggttcatagagccaaaaacgaatcgaccttgccgatcaacacgaccatcatttaatctattttgaggtaggtctggttcagggttacaaataaattttaagttgcctgtttcaaagtcgagttgatataacccgtcttcgagcgcaacaattgcgccgttataattttcttgtaaagcaaaagaacctatttttttatgaacttcccacgcccgtatattcccaccgaattcatcacaacagaataatcgtccatcaacaatatctacccaaaataggcgttggcgaacagtatcccaagttgggcattctccaagttttgtttttacatctaccagtactttaatttccataattccttttttagtccttttattcagtcattcatcgatgaaactaaattaatgaaagctaaatataaaaaccaatgaaaatttttctttacctaataagggattgttattggtcctgtgaattaaaaatgtatggaaataaatagctaaaaactaaattgataaatataagttattacgtggtgtagaaatatcattagtaattctaaatcgacttgatagtttaagagtggacaaatgacatagcgttatacgtaaaagcatgtggatgcattttaattaaaaaggaattagaaatgagcctaaaaaaagttcatcgccactcttgggtatcattagtgatttgctggattatctgggtggttgttgcatacgaccgagagttgattttccgcgcagccaatatgatttgtaatgaatttaatttatctccgacgcaatggggatacaccattgctgcaattacactttctttggccgttcttagtattccggttgctgctttaagtgataaacatgcgtctggttggaagcgaggaatttttcagtggcccttagtaattggatttacttttatttcgttgctttcaggcattacatctttaagttcaagtttctataagtttgtaaccttacgtattatggtttctttgggttgtggggtggcagagccagttggggtgagtaataccgcagaatggtggcctaaggaacatcgcggttttgccataggtgctcatcactcaggttatccggttggagcgctacttagcggtgttgcaatggccaccatcattacctattttggtccgcagaattggcgctatgccttttttcttggaattatatttgctgtaccggcattaactttttgggcgatttattcgacccgtaaacgttattcagagtttcaccaatcttgtgtagataatcaattcacaccaccaacagattttgtgcacgatgaaggagaagaaaaaacaagtacggatagtacatgggaacgtttaaaacaaactctaagttctcggggaattgtgtttaccgcagccagtactttaattacccatgtggtttatattggttttttaactatctttcctgcatttttatacaatattgtcgggttagatctggcgaaatcggctggcttgagcgctgtatttacaattaccggcatgatggggcaaattatttggccgactttgtccgataagattggcagacgactcacattgattttatgtggttgttggatggcggtcagcattgcaagtttttgtttaatctcaggcgtggtttccgttattgcaatacaactgttttttggactatctgccaacgcaatttggcctattttctatgcgacagcatcagattatgcaccagccggagcaattggaactgcaaatagtttaattacagttgctcagtatgtaggtggggcagtcgcaccgattattatgggatatttgcttacgagctttggtggctggcatagtcatcaggggtatatctggtgttttctcttaatgtcatgttgcgcgtttattggcgtgattttgcaaattatattgggttatctcattaaaaaagaaaaatcagaacaagttgataatttaagtttgagtgcaaattaaattcttatttatttcaagtttttaatcttatttttatctctgatgagacaccagcaaagtatgtcgatattggaatactttgctggcattgataagaaaactaattctgccaatacggtgtgtctccatagatttctgtaaaataatctatcactgctctaatattaagtggtggatggcggacattgggataaatggctgcgatatgctgggggtgcgatttaatcgcgacttcatattcaggtaaaagctttattaagtcaccttgttttaaagcttcgccgatcagccaatcaggaaataaaacaatccccatgccatgaagcgcggctgtcattaaactctcggcattgtttgaagaaagtaacggggtaattggataatgtacccattcttcattgggctttctcactaaccagcggttaggaccttcaaaacctttatagactaggcacttgtgttgattaagttctgttgggtggtcgagcgtaccgtatttggcaatatattgaggagaggcggctaaatgatatttttgtgtaccaaaaatacgggcatgaaatgatgaatcagtcagtgctccaatacgaaatattaaatctgtgctttcgcgtaatgggtctataaattcatcggtttgaattagttctattagaagccttggataacgctctgataaacccgccaaccacggcgcaatatgccgttgcccaaaaaacacaggggcattaattcggacgagtccagatggttctatggttttatcttgtaaagccttttgagcttcatcaaattgttcggtaattctttttgcatattcaaaaaataatttacccgattcggtcggtgtgattgctcgtgtatttcggtagaaaagttgttgccccaacgcatcttcaagttgttgaatagtccgagaaatcatggaggcagacacatcttctttacgtgctacatttgagaagttttgagcattgtaaacactaataaagaagcgaagcgtgcggatatcaatcgaatttgttaaatccatttgtgcaatttctgcaaaagtgattcatgaattatgctgtttttctgatgaattggctaccttagtattcgttgcctagatacagatgaggcaatgtagatgcaaattctattactactcctaaccattttaggaggaatggggctatcggtcgaagctgggcttttagggccgttaggaaaggaagtaggtgagttgtgggccacttttagtatttttggtgtgggtgcagcacttacttttttactcatgttgttttttagcccacgcaatagcccttcattttttacacttccatcttggcaattgctgggtggtgttcttggccctgcttacgtcattattttgaccattaccactccaattattggcattgcaatgaccatgattggcattttagcgggacaggtatctaaaagtctgattatcgaccactatggtttactggggactccacatcgaaaagtagaccgtaaacgggtagtggcactcatctttattgttgtcgcacttgtacttgtgtcaaaagcgtaggagacagccatgacaattttaatgattcttctcgccgtcattggcggtgctttgctgagtgtacaggctgcaattaatgggcaacttggagcaaaagttggtgtatttcgtagtgcttttttgactttctcggtcggtgctctaattacggctctccttattttttactttgaacctaaacataccttaacgttattagatgttcctaaatggcagttattaggcgccatgtgtggcgtaccttatattgtcattatggtactggctgtacaaagaattggggctgcagttgctactgttgctgtgatttttgggcaacttttgatgagtatcttaattgataactttggctggtttggcaacgaaacgcttcctttttcactgtatcgattaggggcgctaatttgcttagggattgctttatattttatttattcaagcagtaaggataaaaaggtagaagggtaatacaagcttaagattgaaattaatataggtctcattgttagtcgtaaagcctaccaataatgaggccatgtttaatattttaagtactttaataaatgaaagaagttgctgttgagagatagaagtaaaatataagaaatatggtaaagttaaaaacctaattcaatacattaaaattgatatcaagatattgtaggaaaaacatggttaaaattaaacctcacccagcaacaagcggaaatgcatcggctgatcgccttttaactttgttaactgcttttagaataggtgataaatctttaaccctagcagaactcgcagaacgaacagaattaaataaagcaaccataatgcgcttaatcgtttcgctagaagattttggttttgttaaccgtctttcggatggcagatatacgcttgccagcgaagttatgcgtttaaatacaatttatcaagatgctttagatctagaaagacatgtcatgccttgtttacagcaacttgtagatgaaattggtgagacagcttctttttacgttaaacatggagcttatcgtctttgccaatatcgaataaactctacccatcgactgcgtgttcatgttcaaccgggcgaagttcgaccaatggatggagcagcatgcgctcaagcattgaaatcaacatatgaacaagttttagcaagaactgaacctttttattcaacgggtgtaacagaaccccacgcagctggaatggcattgcctgtgtttgatgctcaaaatgaggtagtaggagccttactcatttcaggcccatcaagccgttttactgcggaagttgcaaaatctgtaggtgattttttcttcaaaattgcagatgacttaacgaaaagtttaggtggtaagagtattcgtaattaaatttaatattgtgaatttaatgtcaagaaggggctcatgatttagcccctttcttatttatactatttatgaagtactttgtggttgtgtaaacaaaacagctttttttctagacatgatgaaaaccataatagctgacacgagatttaaggctgcaagtggaagtaaggcgatagcatgacttcctgttgcatcatggattgcgccatagatattcaccatcattccgccaccaatcagattggcacatgcaccaattgctgctaggcctgccgctgttgtagtcggtgacatccatgaggatgctaaagcccagaatggaccttttgcagaataagcaccaattaaaacgatactaagtaaaaagattgtgccaataagtgaagatgtgaacaaagcaattaataaaccaaatgagatcatcaatagagcgattgctgtgtgccaaaggcgttcatttttacgatctgagctgcggccccaaagaatcatggcaatagaagctataccataaggaattgcattcaccaaaccaatttctacattacttaaaccgaatgatttaattaattgcggtgcccaaacactcattgtactgcctgcagcagaagcaccagaataaataataatcatagaccagatgtatttattctttaaaagttgccatagtgaaatatgaccgattggagttttttgttggcgttcaaattgtagtctttcaactaaccaagatttttgctcactattgagccattttgcttgttctggtcgatcagtaagaacaaataaacaagcgatacccagtaaaacggcggggataccttctaaaataaataaccaatgccatccacgcatacccatccagccatctagggataataaaaatcctgataatggtgaacctagaaagtttgcacctggaattgctaccatgaatattgccaccattctggctctataattagcaggtaaccaataggttagatataaaattacaccagggaaaaagcctgcttcagctgcgcctagtaaaaagcgcataatatataatgaggtggagttctcaacaaatgcagttgcagatgaaattactccccacgtcaccataattcgggcaatccatacttttgctccaaatttttgcatggctaagttgctgggtacttcaaatagaaaatatgcaaagaaaaataagctactggcgaaaccaaaggctgtagctgttaatccaagatcttcattcatttgtaatgaagccatgccaatattgccacgatcaataatagcgatgacataacaaattgttaaaaaaggcagtaatcgccacgccaccttgcgcattgtttcgcgctctatcgcacttggttgagagtattctgtagacataaaaaatcctttttatattcaatattttaattgttttcgcatctaaaatattagaaacaattgagtttcatttagctattgagtaacttccagttagcgatagctcgtgggtttagtaattggccattccaaatactcatgatttgttcgagtgctaaaagaccaacacgattgcgtgaatctgttgtgtttgctcctatgtgaggagtcacaaccaagttaggtaattcccataatggattatctttttctggcggttctgaagaaaaggtatctaaacctgcaccagcaattttattattttttagagcatcgactaatgcagcctgatcaattaattcaccacgtgctgtattgattaagatgcttgagcttttcatcttttcaaattgggagtgagaaaataagtgtttattctctgccgtaagtggacaatgtagactaataatatcgctggtttcgattagtttttcaaagtcgtgttcctgctctacataatcgagctctggcaaattttgtagaaacgggtcatatacttttactttcatgtttaagggagccactaacttcataagtatgctaccgattgcccctaaaccaattaagcccaacgttttgccataaagctccacaccattagcactggctttgtcccaatgtccctctcgaatacgttggtctaaccatgtaacttgtcgagcaacattgaacatgagtgcaaaagcatgttcggcaacagattgtgcatttgcacctactgcaatagtgacaggaatttttcgttcagcagcagcttgagtgtcgattgtgtcaaacccaactccatgttttgcaatcacttttaaattatcagaagcaaaaatcatatctctagaaagtttgcctgttcgaacaatgattgcatcaggttgttcatcatggatgagtttttccattttatcttttgccatgtagggttcagttggaatcaactgaatatcatgggactgagcatacagtaacgcatctgaagttaatgttggccccgtaataagaactttacgtttcattttgactgcactccatttaagtattttgagcaaaatacatccttagtaatcaatattattaaaacgctatttcaaaaaattagtcaatagtaaaaattaaatttaaaaaatgagcaaaatttagtttaaatttgattaaaaatgaaatgacatttcaaaaaaaatactgtcatattaatttgcacaaaaaagctgatgtaagggaaaagttatggcaattggttttagagtgctaaaaaacgacagaaaagttgagcaaaaatggattgaacaatatcgagatctaccagtcgctaatgtaagtgactcaatgaatcggatgacttcaggtggagctcaattaaggccaatgcataaaaagggatatctttgtgggccagccattacagttaaggctcgtccgggtgacaacttgatgttgcactacgctatcgatatcgccgaagcgggagatgtcattgtggttgatgctggtggcgatctaaccaatgcattaattggagagatgatggttgcgtatgccattaaaaaaggtatagctggcattgttattaatggcgctattcgtgattcggttgtaattggagaaggtgaatttccactttttgcagcaggaatttcacatcgaggaccttataaagacggacctggtgaaattaatgtccctatcgcaatcaatggaatggtggttgaacctggagacttgattttaggtgatgaagatgggcttttaagcgtgccttatgcggaagttgaagagatttatctgaaagcaagcgccaaacatgccgctgaacaaaagcaattagagcaaatcgccgtaggtgaaaatgatcgtagttgggtgattaacagcttaaaacaaaaaggatgtgaattacccgaataaggtcattcaaaaccattcaaacagaaagggaactagcgaagtcaatgattgagcttcgttagcctatctaaagttaatttaataatcattatcttactgattgaaaaataggaaatttcaattcggtctatgtgatttcgtctaaaggaaaaggacatgaaatataaagggataatttctttatcattattaatgagtattactttgcagcaagccaaagctgaaagcgaagataactcggtgctaaatgaaaaaataattaaattacaacagcaaatagattatctcatggagaggcagaacttaaatcaaaataacagattgaataaagcacctgaattgagtccaaacaaaacatcaaacactgataagcctgtttcggctgatcagactaaaattaaattttatggaaatatacgggttgatgctgcatatgattttgaaggttcaacgcgttcaattgcgaataaaacagggtcaataccattagacaattcaaactcaacaagtaaatcattaaatgtttctgctgcgacttcacgtgtaggggtggatatcgttaagccgacctcgaagggagatttggttggaaagctagaagccgatttcatggggagtggtggagataacggtaatggttcggttcgggttagacacgcttatatttcactaggaaattggttaattggccagacgacttcaccttttgtaaatagtgatactgctccaagtttggttgattttacaggtgcgatgggcacaggaactcagcgtaatatacaggtccgttatcaacacattgttgatgccaaacaaaaaatattagtcgctttggaaggtggtgatgttgaaaataaaaatgtagaaggtggaagtcgttttcctgcattaaccatgcgatatgaatttaagaatccaaatttattggttcaattgcacggcatgcttcatgaaaatcgagcaatttctaatgcgaatgaggagcaaactaaacttgcttggggagcgggattaggcacgaagtttaacctttctggaaatgatgcgattgtattcaattactatcacatagctggtgataatcgttacatgctttattcaaaagataatgatgcattctactttgatcaaaatcgaatgtatttaagtgaatttgattctgtcgagttaggatatatgcgcaaatggaatgaaaatttacgctcttctttgtccgttggtagtcttgtctataaagattcagatttttcagaaaataaccctgatcaaaataaaaggctaatcaatgcaagcgttaatttattttggacgcctgttgaaaaagtcgatcttggtgttgaatacacttacggtaagagagaaacattttcaaatttagaagggaaattatctcgaatcaacttattaggtcgatataacttttaatgtaattacagccactttaatatcagaagtggctttcttttatctgagaagggctaatattgtggaacaaattaattatgccaatgcaagatcacaattttcaaaggtcatggaaagagtgctgttaggctacgccgttaaaattactcgaaaagagaaagatgctgtggttctaatcagtgaaaaagcataccttgaatataaaaatgcaatgtttgagctcaataaattaaaaaacaaagatttttaactcccaactatccgcttctcaagcatctccataaaggtttttaaaataatattatgatttttgcctttcttctatcctcatttacttttttaagctatgaaagctagtgtaattttagaaattattaaaattaaaaccaaattattgtgcttactgactactatagtcttggtaaggtaaattatatcgattaataaaattattattatgaatttttatggattttattattttttgtggtaaattttttgcgttataaataggtttttacaaaaatgcaaaacatacttacttttattaaaaatggtcaaaaatttactttagatgcaagcaatattaaaagtgtaagagatacgggaaatggttttgaaatcactcttaaaagtggtgagataattcaagctgagtcctatagtgttactcctaatactcagccagtggagcaagtttctagtcagcaagtagaaaataattctgaagctgatgaggaatttgaaaaagaagaagttttgaaagaaaagagtttattggattcacaaacaatgttatggggtggtgctgcgatcgcacttggtggtattgcgatagcagcatcaggtagtggtggtagtgatggttcagcaccttctgatcaaactcctccagcaagtttaactaaaatactgtctaaagatggtaaagctgtaagtggtttaacagaagctggagcaactgttatagttgaaaattcggctggaaaagtaatcggttctgccaaagcaggagcagatgggacatatttaattaatttagataaagcctatattaatggtgaaatactaaaagtttctgctcaagatactgccggtaatagtacagttaaacaagagcttatcgcttctgatattacagctcctactttaacacatgctatttcttctaacggtaaaactattacaggtttgacagaggctaattcaactgtcaccgttaaagattcatctggaaaaatcattggaactgcaaagtctgataatgatggaaaatatacagtcatactggataaagcttatttaaatggtgaaaatcttagtatttctgccgaagatttagctggtaataaatcaacaattcaaacaattttggctgacgataaaactgcgccaataggtttaacagttgcaattgatacagcgggtaaattcgttacaggtgtgaccgaagcgaatgctgttgtaacaattaaaaatacagtaggaactgtagtcggtacagctactgctgataccgcaggtaaatactcgattacactagataaagtatatttaaatggtgaaagcttaagcgctactgcatcagatcaatctggtaatgctacagcaccaaaaaccattatcgcaccagataccacggcaccatcaagtttaactgcaagtattggtactgcgggtaaagtagttacaggtgtaactgaagccaatgctgttgtgacagttaagaatgctgcaggaattgtagttggtacagctacggctgatgccacaggtaaatattcagttaccctagataaagcttatctaaatggcgaaagtttaagtataacagcgacagataaagcgggtaatgctaccgcaccaaaaataatagttgcaccagacattacagcaccttcaagtctgactgcaacgattgatgccgcaggtaaagcaattaccggtgtgactgaggccaatgcaacagtaacagttaagaacgtggtaggaaccgtagtgggtacaggtacagccgatgtcacaggtaaatattcagttaccctagataaagcttacttgaatggtgaaagcttaaatgtaacggctgtggataaagcgggtaatgctaccgtaccaaaaacaattattgcaccggataccacagcaccatcaaatctgactgcaacgattgatgccgcaggtgaagcaattacaggtgtaactgaagccaatgctgttgtgacagttaagaatgctgcaggaattgtagttggtacaggtacagctgatgccacaggtaaatattcaattacgctagataaagcttatctaaatggcgaaagcttaaatgctattgcagcagataaagtaggtaatactacaacaccaaaaacaattattgcaccggataccacggcaccttcaagtttaattgcaacgattgatgcttcaggtaaagtggttgcaggtgtaacggaagcagatgcaagagtaacagtagaacaagtaactgctgtttataaagaagtaacggttttagaaacccaatttattctaagtgagtcagtacagacaaattatttatcgaagacatattcttttgaagttacaggtacaaatgcacatgtttctttaaatttgagttcctcgactaattcactttctggtagttatagttcaattctttctggagcgagtttaaatacaagactaactggtaatgtttcccaagctggagaaggcaattacagtattgatttagcacaaggttcggtattaccgcctggaacctatactttgacagtaaattattctagttcaatggtccccgttataaacgtaaatgtaacgcaagaagtgccaacaaccattttagaagtagaccattacgaaacaaaagttgtaggtacagctaatgcagatgaggcaggaaattattctattactctagataaagcttacttaaatggtgaaaatttaatcgcaacagcaacagatcaatcgggtaataaaactgaggcaaaagaagttattgttccagatatcacaccaccgattttacatcaaccaactattcaaggtggatggactgaggggcaagtcgtacaaggtacaacagaagcaaacgtcactgtaactattaaaaacgctacaggtgatgtgatcggttcagctatagctgatgcatcagggtattactccgtaattttgaatactgtttatgagaatggtgagttattaaaagtaatagctacagataataaagggaatgaaaatttgcttcaattaaatgcacctgatactacagcacctatactagctaatttatttagttatgatttgagtacagataaaattatttttaatgcgccaagtgatagttactttgttgaacaaaaaattgatggtgcttgggtccacgtaaatattgaggaaaaattcgattggttaaatgtagaatatagggtaactgctacagatcaagctgggaatagttctcaaccactaactactataattaatactgcatcgggaacttacaagccaacagaccctacatttactcaaattattaaaggatctacaggaaatgattatctatatggtggcaatggagatgacacgttaatttctaatggaggttctgatagtttatacggtggatccgggaacgatacactgatttatggtggtaattccccgaatatatatacaggattaattggtgaagcagggaatgacacctatattgtagataaagcattactcggttcattaagttacgttcatatcttagataatacaaatgaacaaaatacactttatttaaaatcagtttcagctgatgaaattattttaaaacaggctagtgcagatagaattattacatttaatgattcaactgccaccatacattttggtgaggggcaattatcctcaattgtatttgacgatggaacagtttggaataaagcacaaattgaagccaatattatcggtagattattaggtacagatggagatgatcatttacaggcagatgctaattattccgtaatttatggtctagatggtaatgatacgatacaaggtggtgtacagaatgattatctatatggtggcaatggagatgacacgttaatttctaatggaggttctgatagtttatacggtggatctgggaacgatacactgatttatggtggtaattccccgaatgtatatacaggattaattggcgaagcagggaatgacacctatattgtagataaagcattattagggtcgttgagttacgttcatatcttagataatacaaatgaacaaaatacactttatttaaaatcagtttcagctgatgaaattattttaaaacaggctagtgcggatagaattattacatttaatgattcaactgccaccattcattttggtgagggactattatcatctattgtatttgatgatgggacgacttgggataaagcgcaaatagaacaacatattgctaaaacagtagtgggtacgtttgataatgatgtagttgagacagctacagccaaccagacatattcatatactttagatacaggtgcagacactttaattttcaaagttcttgatgacattgataatttaggtggtaatagtaatggagagtggacagattttaatctttcagagaatgataaacttgatttgtcacaattgcttataaataacaatggaaaccttcaagaatttataacggtaaaagatacgcaggctggagtagttatgtctgtagatagagatggctctaatcaatccacttatcattcacaagaattaattctacttactgctaagcactatacgttagaggatttaatggcttcaaatgcatttattcattaaatagttgtgatctaacatagaaactaaaaagagaccagtgaatggtctcttttttcttaattatactagcatcctcaaatttattttttagtcgtatccacagaaaccacaacagatagaccaggacgcaacaatttaatatcaggttggttctcaaggagtttgatgcgtaaaggtaaacgctgaacaattttagtaaagttacccgtcgcatttgttgctgaaattggcgagaaaaatgcgccagtagaaggagagaaactgtctaccacaccttttaactcaacattgtaagcgtcgacataaacagtgacaggctggccgattttaatttgttttagctcaatttcacggaagtttgcttctacatacacttgatctaaaggcacaaccaccatgagtggattacctgcgccaacaaagttgcccacatttgcagacttttgcccaatcatgccatcaataggtgctcgaatttctgtatagctcagattcagttttgctttatcaagcgcagcttgggcttgtttcaaagccgcttgtttagcttgaacctggatcttatattggttgagctgatactgcgcatcaatgactttttctttactgctgtccaagtcggcatattgctcggtcaatgtggtttttgactgttgtgtaatcaatctagattcagcaccaagtgcctgtaattgctcatagcgtgcggtattatctttggtgagtttaatgccggcttctacttttctaagctgggcctctgtttctcgtataacagtgggttgtctttctactgccagcattgcttcatttaagtcagcttgtgctttggcataattagattcagcttcagctaaagccgcctgataatcacgtgcatcaatccgtgccaaaagctggcctttttttacggtctggtgatctttaatataaatttcttcaatattacctgacactttgggagcaatggttgagtactcgacgtctacccgcgcatcatcagttttaacaatggaagaaggtaaaaatataacttttaaaatccataaaatggaaactagaacgataataaatgcaataaccataacccagtgtttcttaagatattgcatctttgttaacttgggtgactcggtcatggagtgatcttgggcttcgagagtactcataaagattttcctgagttatgactattcattaacttaatgagagcaatgcgtgggggataagttctaactggcaaaatcaccataacgataaataaaattgcagtaagtcccgctaaaatcaaatattgatcactaatgactaaaactgattgctgtgcctgaatcgcagaatttaaggcagataaaccaccggaaacacgttcggtaccatctgcactcagcacaggcggggtaagaggattaataacagggccttgaatattttgaaaaacatgttgtgcggtattttcaatcagtcgtgttgaatggtattcgccacgtactcgattgacccagtccaaaaggcatacaccgagtacgccgctaatagcacgcggggtgttaatcataggcgaagcataaattgccatagttggatggacgctatttgtacccatcatgaggagcgaaagcactacacaggtttgacctaaacatgagattgcatgccaaaaatagaattggtcttggttccaagtcgtatcaagttgacttgcacctaagcagccaaccataaccaaaagtaaaccaaatccatgtacatatcggctatcaacccaagcttggttcaaaactttaataacaatcgggatatagataaattgtaatgcggcaatttgtaagccaatccacatggtttgagtaggcttataaccatgcacggcgcttaagtaattaaggggtaatgtactggttgacataccaataaccacaaagcagaacaacgcaataacagcataaccaaaatttcgtatttcgagcatttgcggtttaattaatggtgttggatagcgccattcatgtattaaaaataaaggtagggtaatggcacttattaaagccaaaacacaaatcaattttgaatggaaccagtccaaatgattgccatgcaaaagcatggtactaaggcttgccaaaccaataatggctagaatcgcgccagtccaatcgtaagtttttattcttgagtaatttaatggatcttgcggaataccgaagtaaactaacgcagcacttaaagcacaaaaagggatggtttggaaaaatatcatcttccaaccaatcacatctaaataaaaggcagcaagcgcagcgcttaagtttgggaaaaaagttgctgttaatgcatagcaggccaagccccatagacgaatttcaggtcctaggaatctaagtgcacatgccattaataaaggaatagttaaaccattggcgagtccttgtaagccccgtaataaataaaatatttcgatatttgggctaaaaggaattaaaacgctagagaagaggcaaagtcctatcgcaaaaagaagaacccgacgcatggaaaaaataaccgcccaactggtggacaggatcatcccaataatcatggcactggcataaatactgctgacccaataaccagagtcgacactaatacccatctcaccgcgaatatcgaccaaggtaatgctgctaattcggttattaaattcgacagtcatggctgcaaaaattgcacctgccaaaccgatgagtggtcgtatattcatcttttaccttaaattttaaaatgagcttaatgcttatagcggtgattaagctcaactgtaccgatcggtactctactatcttattaaatttacgtcaattctcgattttgaacttttcgatgagttacactaagaatgaaattgctaaatatgtttgtagggtcgtatgtctgattgcactaaaacgaatgagaaagatcaaaaaattctggatgcagcaacaaagttttttctgatccatggttttagtgggacaacgacagatatgattcaaaaagaagcgggcgtttcaaaagcgaccatgtatggttgttttaaaaataaagaagcgatgtttgctgcggtcattgaacgccaatgtaccaacatgcaaaaacaaattatgtcggtcgagacaaaagccaaaaatttacgttcagccttaaccgaaattgggaaaacttatctgtgctttatcttatcgcattccggtttggctttttttagagtctgtattgcagaggctgtaaggttcccggaattatccgaaaagttctttgaagtgggaccacaacgtctagcaaatattattgcaggttatcttgaaaagtcggttaaacaaggagaaattgaattaacgtcttcttcggaagtcgcagcaaatatttttttatcactgttaagaagtgatgcccacctaaaatgtttgactcatcctgattatttaatctcagctgatgaaattagtacttgggttgaatacgctgttgatttatttttaaaaaatattaattacaaactagattgatattaaggagcttatgcctccttaaaaaacctaaatgtagaagtaaaaagagaccaacttgtggtctctttttattttttagatcgcttctctggtcatctcaccattcaccaatcttaaaatctgcaacgggttgctgtcttttaaggcttccggcaataaactttgcggatagttctggtaacacacagggcgcaagtaacggtcaatggccaaggttccaactgaagtacctcgtgcatctgaagtggctgggtatggcccgccgtgtaccatggcatcacacacctcaacacctgttggatagccatttataagtaatcgcccagctttttcttctaatacaggaactacctctgcaaactcggttaagtcagcctcatcggcaattaaagtcgcagtcagttgcccattcatgctttgtaatgcctgaatgagttgggctttatcttcaacttcaatgatgactgtggttggcccaaagatttcttcctgtaaaagctggtcacctgccagtaaaagctcaacatcagctttaaacagttgtggctgagcctgattgccttgttgagtttgacctgccaaatgcttaataccttgatgctcggttaagtgctcaagaccagcggtataactttttaaggtgccggcattgagcatagtctgtgcaggcttagcccccataatttcagtcaggttgctaataagctggctaaattcagctgatttaatacccaagattaaacccggattggtacagaactgaccacagcctaaaaccactgaatcagccaagtcctgtgcaattttgtcaccacggttttttaaggcttcgggcaacatcaacatcgggttaatactgctcatttcagcaaagactggaatcggttgtggacgggctgcggccatatcacataaagcacgaccaccacgcaatgaaccggtaaaacccacagcctgaattaaaggatgcttcactaaaggttcacccacgccattaccgtagatcatattaaacacaccttttggcatatttgatttttctacgccacgttcaattgcctgcgctacaaagtctgctgtggccatgtgtccactatgggctttcaccactacagagcaacctgctgccagtgccgaagcagtgtcaccacccgcagttgagaatgctaaaggaaagttacttgccccaaagactgcaacagggcctacaccgattttaatctgacgcaagtctgggcgaggtaaaggctggcgctcaggcaaagcggtatcaatacgggcacctaaaaaatcaccacggcgcagcactttagcaaacaggcgcatttgcccactggtccgggcacgttcaccttgtaaacgtgcaagtggcaaagcagtttcctgtgagacaatttctagaaaatcggtacccaaagcatcgagttcatctgcaatattttctaaaaaaacagcacgctgttcaggtgtggtatggcggtaagtcttaaaggcttgactggctgcttcacaggcctgattaatctcttgctcggttgcatggtgaaactcataaggcaaagcttcaccagtcgtagcttgaatactttttaataaggttgtaccttgtgcgctgcgtgaaccaccaataaagttgtgtccgataatggtcataacaaatatcctgaaattaatgagagtgtcttggaaggttgtcttggtttacgactcgcatatataaagttgcgggttccaaacaaccaccagtagataattgacctaccatgttgcgatacatttcttgccaaggtgtttgagatggagataccgtcggtttccattcacggcggcgttgttctaactcttcgtcagaaatgagcacgttgacagaacgtttatttaaatcaatacgtaaacggtcattggttttaagtaaggcaattccaccgcctacagctgcttcgggtgacatattgagaatagatgggctggcagaagttccactttggcggccatctcctaagcaaggcagtgaatcaatcccttttttaattaactctgctggtggagccatattgacgacttcagcactgcccggataacccactgtacctgcgccacgaatgactaaaatacaatgttcatcaatgtttaaggcagggtcattgatacgtgcgtgatagtcttcgggaccttcaaaaacgattgcgcgtgcttcgaagctattttcattgtttggatctgataaataggtttttttaaatgcttcgcccactacagacattttcataatggcgctgtcaaagaagttaccactgagcacaatgaaaccggcaccatgtttaagaggttgttcataagggaaaatgacatctgcatttgaggtttttgcatttttggcaatttccccaattgttttaccgctaaccgatgcacaatcttcgtgtaatacaccagctttttgtaattcgtgtagaacggcaggaacaccacccgcacggtgaaaaccttcacccaaatatttacccgccggcatacagttcacaataagcggaatgttttcacccacacgttgccagtcttctaaactcagctcaatacccatatgacgggcaatcgcaatgaggtgaggaggacagttactcgatgcacctaaagctgaggctactgcaattgcattttcaaaagattgtttggtcataattttagaaggacgtaaatcttctaaaaccatttcacatattcttttgccggtcatataggccatttgcccacgttcgcggtaaggagcgggaatacttgcacatgtcggtaaagacatacccaatgcttctgccaaagcattcatggaaagtgcagtgcccatggtgttgcaatgcccgaccgaaggtgaagcagaagtggtcatttccatgaacccttcatagtcaattttaccagtggcaagtaagtttcttgcatgccaaagcacagtgccagaaccaattaactcacctttaaaatgaccatctagcattggcccaccagacaacacaattgcaggtatatctgttgtggctgctgccattaaacatgcaggggtagttttgtcacagccagtggtcagcaccacaccatcaagcggataaccatgcaagatttcaaccaaacctaaataggccaagttgcggtcaagtgcagcagttggacgacgggtttgttctgcaatcgggtggacggggaattccattggaataccacccgcgtctcgaatacccgctttaacgcgttcagcaagttctttgtgatgacggttacatggagtcaaatcactaccggtttgtgcaattccaataatcgggcgacctgattgtaactcggcacgggtcaaaccatagttcatgtaacgctcaacatataaagcggtcatgtcggcatgttcaggatcatcaaaccattcttggctacgtaaaaaaatccgtttattttgatcattcattttttgatcctttcactcatactttttgaaatgtagtttatttaccagatgaatcttgcaattcaaccgatcgataatacgtgaaaattatagtaattcacgctgcttcaaattacgcatcaaagcatttattccaaaattccacggtgttgctttatcactggtcataaccgtgttgtacaaagtaccaagtttaggcgaatggatacggacgacatctccaactttatgggtaaagccagccccagcttgttctcgatcttgagtcggtgcaaataaagtacccaagaacaaaacaaaaccgtctggatattgatggttttcattaagagtttgttgaattaaatcttcaggatctcggctaatttgcgacatagaactcaccccatttaacacaaagttatcggtgccttgaatttgcagttcaacatcgcaagtacgaatatcatttaaagtaaaagtatgatcaaaaaggcgaataaatgggccaatcgcacaagatgcattgttatctttcgctttactcaacagtaaagcgctacggccttcaaagtcccgtaaattcacatcgttacctaaagtcgcacctaaaatcttaccttggctgttggcaactaatacgacttccggctctggattattccactcagactttgggtgaataccaatattttgtcctgtgcctacagctgctaaaacaggagctttagtaaaaatctcggcatctgtaccaatacctacctcaagatattgagaccacattttttgttcgattaaatattctttgagttgtagcgctttttcagaaccaggttcgattgtttttaaattatcaccgattacgccttgtacaacttcacgaatcgattgagctttttgtgcatcgccaccggcttgttcttcaatcacgcgttctaacatgcttgcagcaaaggtaacacctgcagctttaattacttgtaaatcaattggagctaaaaagtatgccttgttggtatctggctcggcgatagtattggcaaataattcatcaattgaaccaactcgtcttccttcaatttcagataaagcttttaaaggatcagcactttcaagtaactcggaaatagtatgaaatttttccgagatatcaaaaacttgatttccccttaaaataataggggatggacccgaaatttgacttggaatccacgcacggccaattaagcatccttgagttgcatcatctggtaatgagttctgggaatttaacgtaaagttcatttaaagcttccttcttttatttgaaatcatgatatgtttcttatttaataaacaccaatcgtaataatttaattattaataaccagtggttatcaaaaaggaattttaaaaatggcagatttgacttactcaagtttaaataactggcttaaattcaagcatttggttttattagagacgttagctcgaaccaataacatgcatttggctgccgagcagatgaatttaagtcaacctgccgtaagtaaaatgctaaaggaaattgagggccttcttgggtttcaggtctttgagcggctgccccgaaatatgcctgtaacggcattgggtgaacatgtcattcgttatgcacaacgtgttttgaatgacgcaaagcattttgtcgaagacatcgagattttacggttgggtggacatggatttttaaaagtagggggaatatttgcagcaaccgccgtggtaattccaaactcaattatcgaaattaagaaacaatggccgctactttctatagatgttgttgaacagaccagtgaccatttaatggaaatgttgagtgaacatactctagatttagccataggtcgctttaccgatgtgacgcaaagtcagtttttcgatttccagccgttaggccctgaacccttctgtattgttgtcaataatgcgcacccatgtgcccagaaaaagttttgtacattagaagaattattaaaatggccgtgggtactttatcctaaaggcacaccgattcgagagcgtatggaaggtgcatttgcccgagctaaagtcaaaattcctttaaatacggtaaataccatgtcgatgcagacctttttacagatcttaaaaggcgcacctatggtgggcatgttgccagaagcaatggtgattgatcaggtgaaagaaggacaactacagattttagaaacagacctgattttagatgcccaagattatggaattttgacacgtaaagatgaaccagtgtctgatatagccgcagcatttattaatattttacttaaaaatgcaaaacgtaagtaaagtcctcagcctcaagttatagaagacttggggcttttaaattaaaagaaagcctatttaatttagtcaaaatttcatcataaaactgatattaaaaagttatcaatatttagaaattattcattggaaattattgcaaggactccttatcgtttaattcatgatgattaaaaatctttaagtgaataagaattaggaaaggatccctgtatgaatgtgttaattactggtggcacgggttttattggaaagcaaatcgccaaagagattttaaaaaccggaagcctgactttagacggtaaacaagctaagcccatcgataaaattattttgtttgatgcgtttgctggtgatgatttaccgcaagacccaaaaattgaagtggtgattggcgatattaccgacaaaaccatagtggcaaatattacagaaaaaattgatattgtttggcacttagccgccgtggtgagttcggcagcagaggccgattttgacttgggaatggatgtaaacctttatggccttttaaatttattagaagaattaagaaaaaacaaaccacgcctcgagtcatttttgcgagtggctgcgctgtatttggtggtcaattaccagaagttgtaacagatgatacggtggttacaccaaagtcctcttacggtatgcaaaaagcagtaggagaattgctcgtttcagattattcacgtaaaggctttattgatggccgtgttttaagattaccgactattgtggttcgtccgggtaagcctaataaagccgcatctacattttttagctcaattatccgcgagcctttaaaaggtgaaacggcagtttgtccagtcccgccagatactccggtttttattacttcaccacgacgctgtgttgagtcaatgattaaggctgcgtcaatttcttcagatgcactccaagataaccgaattattcctttaccgggattgaccgttaccgttaagcaaatgcttgaggctcttgaaaaagttgccggtaaacaagcaactgatttagtgcagtggcaagaagataaaacgattcaaaggattgttcaaagttggccggttcaagtgaaagctgaatatgccgaatctttaggtttccaagcagatgagaattttgaaagcatcattcaggcacatatagaagatacccaaaattaatggcagtgatcgccaattcatgtgagagttattatggaagatatcaaaaatgtcactgctctcgaagagcagacaattaagcgtatttcaagtcgaatcatcccgtttcttattattttattcattatggcctttctagacagaaccaatattggttttgctgcgctacatatgaatgatgcaattggaattacccaaactatttttggcttaggggcgggtgtatttttcttgggttattttattgcagaagtaccgagtaatgttttacttcatcggtttggtgcacggatctggattgctcgaatcatgattacttggggaattattgccgggcttatgggatttatccatagtggtacccaatttattattttacggtttttactgggtattgcagaagcaggtttctttccgggggttattttttatttaaccttatggtttcctgctaaatatcgtgcccgtgtcttcgcgactttctatttagggttaccaattgcccaaattattggagcgccaatttcggtcggccttatgcaatggggcaataccattggctatgaaggctggcgtttaatgtatattttagaagggattccttccattattttaggactggtttgcctaaaatatttaaccaataacccaaaagaagcacagtggttaacagctgagcagcgtcaatggctcatgaatacgctagaacgtgaagaaagagaaaaagagcaatctgccgatgctgctttaacaaaaggtgaacttattaaacaagtgtttaaaaatcctttagtgtggattatggcaattgtctattttggaattacgtctggttcaaatgcgatgttcttcttcttaccaagtgttttagagtcgttccgtaacacctttggtatgcaaattagccttatccaaaatggcttactcaccgctattccatatgcatttgcggcggttggtatggttttatggagccgccgttctgaccgtaaacaagagcgttataaacacggtgcttgtgctgcacttatggcggctttcgcaattgcaattgctttgattgtgaatcaaccgtgggcaattattgtgggctttattttgctcgcaattggtgtatttagtgcaattaacattttctggactatccctgggcaaactctaacgggtgttggtgccgcagccggtattggcttaattaattcggtaggtaatttaagtggttttactggtccatatttaacaggctatttatataccaccacgggcacctatacagtagcgttccttgccattgcaggatttgtcgccatgggcggtttagggttactgcttttggcaaagttaaagtctgatagcctaaaagtagaacaacagcgacttaaagtgcggactgctacggagatgaaataatggctcggattggttttgttggaacgggcattatgggaatgccaatggccatgaacttattaaaagctggtcatcaagttaaggtctggaatagaacttcatctaaagcagtaagtttaaaagaagctggtgcatatgtttgtagtgaacttgaacaagtcggaaaagatgtagagtttctgatttgtatgctcagtgatggaaaaacctgtgatgaaattctatttcaagaacgtggtgcaatttcacagctaaaacctgaaagcacggtcatagtgatgagttcgatacctgttgaagttgcaaaaaaacaaagtgaaaaatgtaaagaaaacggacttagatatttagatgcacctgtttcgggcggtgaaaaaggtgctcaaaatgcaagtctggcgattatggtaggtggcgatgctcaaacattttcacatgctgaacatgttctatctgccatggggcggccaattttagttggagaggctggctgtggaatgctggcaaaactcgtcaatcaaatgatagtcgcatctactattgcaaccgtgagtgaaggtttattgcttgccagtaaagcaggagcagacccgataaaactcaaacaagcattaacaggcggttttgcagattctccgattttgcaacagcatggcgaacgcatgttaaatcgagattttaaaccgggaggtacagctcgaaaccagcataaagacattcatacagccgttagctatgctaaatcgcttgagttgaatttacctatagcccaaaaagtcagtcaattgttcgaaaatatgcttgctgccggagacggtgagcttgatcattctggtttaattcgtgagcttgaacgaatgaatcatgtgtaatattgctttaattttagcggtacttgatgaatagacataatcaagtaccgctttttttctggtactaattttttaatagtccacttttattgcttttatatattcttaatatctactgacggagaaaccccaaaaaagcgtttatactctctggaaaattgggacaagctttcataaccgacttgcatgctggtagatgaaatatcgtattcttcggtcattaataaacgccgtgcttcggtcaatctcattctcttttgatactgtaagggactcattgaggttatatccctaaaatgttgatgaaaacttgatgcactcatccccattgtgcttgccagttcttcaatactaaatggtttcgcaaaatttgttttcagccattcaatcgccttcacaattcgatgacctgtagtgcctgccgctacaatacgtttaagacgatcgccttgcgggctcatcaataaacgataaaaaatttccttaataataagaggagacaagatggggatgtcttgtggcgtatctagtaattttattaaccgtataaacgcatcattcagctctgaattgactactccaacagccattccttttttctcagtatttacatctttaaagggaatatgggcctcaagcatgatttgagcaagtaaatatgggtctagccttagcacaattgagagatagggttgttcaacagaagcttcaagcacttgagcaattacaggcaggtcaattgcagtaaaaaggaaatggttagagtcataagtataagtctcttcgctaagaatcacctgttttttgccttgagcaatcatacatagactcgcatccatcatgctgctacttggtttggtcaatgtctctgcacgatataaagtcagtcccgtaatagctgtttcgaatgtgcctttttctcgtgtccattgatcgacaagttgagccaattcttgattatggttagacctattcgccattcagattctaccgattaccctctgtatttttattgtaggcatttcaaataagaaaaatagtgagaagtgcaacaatttggaggattaggcaaatctgtgagaggaatagaacaacaccttacaactttcatttttatactgtttgaacaacgcttaatcctgcatccctcattaaattgagggcattggtatcaatctaggaaaaaagatgaatgttaaggcagtcacgtttgtgaccagtttatttatctcaatgggagtacccgcaatggataaaaaatcagtcacagcatttcaaaccgttaaaaaagccaaccaacaacaggtaattaccggcctagataatattttcacgggtcaagttgcaattaaaccattaactgatgttactgacagtataaatgcttccagtgcttatgtaagttttaatgccaatgcccgttcattttggcatacccatcctaaagggcaatatctcattgttacagaaggagagggactggtgcaagaatggggtaaacctgcggaaaaaatttctgtaggagatgtgatttattgtccacctggagtgaaacattggcatggtgcaagtggaaattctgcgatgacacatcttgctttaactgcaactgatgaacatggcaaaaatgtggactggttagagcctgtatcagatgagcaatataaagaggcgggccactgaaattataaagttcctatttctagccatcagtttgttggcgctgaatcaacagatttatgcagctacccatatggtccagcttcctttatctcaaaagaaggaaataacacaaatgcaaaattctttatccgaacagcaacaggcaatcataccgattgctgcctatgctgcaaatggtgacctagctaaactcagtcaatcattaaaagatggtttagatttagggttaaccattgcagaaattaaggaagttttagttcaaacctatgcctatgcaggttttcctcgaagtttgaatgcccttacaacatttatgcaggtgctagagcagcgtaaagaaagcggtattcgtgacatagagggtaagactaatagcactctaccgaaagattatcaggcacttttacaaggtactcagaatcaaactcagttggtgggtcaacctgtaaaaggtgcactttttgattttgctccagctatagatgagtatttaaaggctcatctttttggcgatattttttcaagggatgtgctgaattggcaagatcgtgagattgctactttgagcatgctttcggctctagaaggtgtagatagccaacttcaatcccatcttaatattgcaaagactcaaggtgttagttctcatcaatttgaaaatatacagaaaatacttgctgaaaaagtaagtctgcaagtgggtcaaaggttccaaaatgtattgaccagttttcacaatcaatcgctctaaatgagctcccagcgaaaaaatcgtcttcatttacattaagcatgagagaaaaaatatgacaactgaagttttaggttatgccgcgctgtcatcagaaactcctttagttccgtttaaatttgaacgtagaaccccccgtgaagatgatgttgtcattcaaattgagtattgtggtgtttgtcactctgatctacatcaagctaaaaatgattggggatttagtgcttatccattagttccgggccatgaaattgttggacgtgttacctcaattggtcctaaagtcacaaagtataaagttggtgatttagtgggcattggctgtatggtcgattcgtgccgtacttgttctgcttgtcattcaggactcgagcaatattgtgaagaaggtaacatccagacttatggcggcgtagatcgccatgaccaacgcccaacttatggtggatattcacaaagcattacctgtagtcaagattttgtattaaaagtacctgaaaatctggatgctcaagctgtaccaccactactttgtgcgggtattaccacatggtcgccgctacgtcactggaatgttggaaagggcagtaaagttgctgtcgttggtttaggtggtttaggacacatggcgattaaacttgccaatgctctaggcgctgaagtgacactatttactcgctcagcaaacaaagaacaagatgcaaaacaacttggcgcacatcatgtagtcttatcaacagatgagaatcaaatgaagtcggtattaaatcaatttgatttaattgttgatactgtgccttataaccatgatttgaagccttatattccaactttagctttaaatggaaccattgtattagttggatatttaggtgaaattagcgcaaattcagtacctatgattttaggtagaaaatcaattgcaggctcggttattggtggaattaaagaaacacaagaactactcgatttttgtggtgagcataatatcgtttctgaagtagagatgattaatatgcaaaacattaatgaagcttttgaacgtatgctaaagagcgacgtgaagtatcgttttgtgattgatatgaaaacactgtctgaagattaattcagacattatttgagctgtgcatactatgcgtagtgtgtacagctcaaagatttaatatcaatgtgagtgttatgatttagaaggaatatatttatgcatagcaaagataaatagcttaaataaaatactaaaaccaaaaacagataagctgagtcctaacacgaggctcaccgctataaacatgattaaattatttgactcgcttttgtagactttttgcccaatcattaaatagtttttattagttagtaaatttggcgttttttttgcttactatctaaggtcttatctaacatacttaatttgattgctgtataaatgatgattcaaaacgtcttgctctcttatggtgtttttttcacatgaaaaatgcactaaataaacacatctttttattttgcactctatttgtgcacggggtgccataatgaagttattggcttcattactcactttactcattctatgtggatgttcctcatctgagcaaaatagaaaaactcaagaaaactcaacctctcattcaatatgtgtttttgatagtacaaatacaaaagtctgtgtagccaaacctgcccaaagaattgtctctttgtttgagtcgggtttagatggcctctatatgctagggcaaggcgacaaagtaattggtatacctgccgaagtatacattcaacctttattatttaatgcctattcaaaaatagataaacgcattgctaataaacagcttgcagcaccttcgcaaggagccaatgcaaccaatattgaaagtctcgtgttgctaaaaccagatctggtgattgtaggaagcgggcagactcaaacgattgaactgttacggcagtttggcatcgctgtatatgtaatggagtcaggcacctataaacaagtgaaagaagaactgtctgaaattgctattctgagcggcgcccaaaagcgagctcaggaaattttaaatttctctgatgaaattgtggcagaagtcgcagccaaaacggcccgtcagccaaataaacaatcgatttactatgcttggtctggtggacgaattttttctacctctggacgagagtcgattaccaatgactttattgaactcgctggtgcttacaatattgttcagaccaatgctaaccagcctaatgtaaatcccgagactctcattgaatggaaccctgacaatattgtgctttggaataccaacccaaaactgatttatgaacgaaaagaattacagggtttaagcgctgtacaaaaccgaaaggtatttaatttgagtcctgcatttatatataacccgcacaccatcaaaatcattattacagcgatttatctaaatcacagtatttatcctgaacagtctgatttaccagtaagtgctttacaacagcgtattttaaccaagttgtatggtgagcagcttgctaaagtgttgatgcaatgaatatggaaaaactgaagtattactggttttacccgttacctttcatcatgatttttatctcattgcttattgggccaactcaaacgttaagtgcatgggattatttgttttggggtgtacaagcggtctttggtacaccatattttgacgctgaacaatttaggctgatgcaaaacattttagtaaatgtcaggctgcctagaattttactgacctttatggtgggagccgcattagcaaccgcgggtaatggcttgcaggcattgtttcgtaatcctttggtcgactcgtatgtacttggtatttcatctggcgctgctttcggtgcagctttggcactttctttaagttggctttcgccaaatctatccgcctttatttttggagtatgcgccgttgccttaacgtatttatttgcacatcaaaaacatgaaagtcagacgtctttagtgatggtgattttatcgggcatgattgtttcgggattgtttttagcaggacttacggttattcaatacctaagcgatccatttaaattacaagcaattgtgcaatggacgatgggcaacttacatcaggcgtcttggcaaaaggttcaatatgccgtgctaccaatctgtattggtcttgctggtttatttgcgatgcgttggcgtctaaacctaatggcacttggtgctgaagaagcgcaggctgttggtgttaacccaaggtgggaacagcttcttttaattgctctggtgactgtatgtacctcaacctctgtggctgctgctggcattattagtttatatgggctgtttatgccgcatattgtgagaatgttggttgggccagaccatcgctacagtattcctgccaatatggtgttgggcggcagttttctactcatgattgataatttttctcgggttttactgacgtttgaaataccaattggtatttttaccatgttacttggcgcgccatttttcttattattaatgaaaacacagaggactcattgggcatgattcaaattgatcagttaaattatgcctatgggcacaaacaggttcttaaaaatattcatctagagtttcccgaaaatcagttttcagtgattttagggcgtaatggttgtggtaaatcgacactgtttaaattgatggcgggcctagaacctgtaaaagatggcttgattcgttactctggaaaagcactatcggactttaaaggaaaagatcgggcagccttactcggttttttaccgcagtttcataaaaccgtatttccatttttggttaaagatgtggtgattacggggcgtgctgcttttagcagatatagaccttcaaaatcagactgggaacgtgtagaccaagctttgcttgatttagacatcgagcatttgcgtgaccgtccttataccgagctatcgggtggcgaacggcaattggttatgattgcgcgtattttagtgcaagcaccgaaagtcattttgctcgatgagccaaccaatcatctcgatgtttattaccagtcttatttaatgaaaaagttgcgtcagttgtcgaggcaaaattttacggtgattgcaattatgcatgatcccaacttggcttttttatttgcagatcatttgttttttatgcgccaacacgaagtagttaagcctgaatctaaaactcgtataaccgatcctaagtttttaaaaagtgtctatgatgtcgagtttcatgaagccatgattcaagacaaaaccattgtgattcctgatcattcgtggctgtaaatatgacactttattatcaattggttggtaaatcagactataggtctgcggtagagtttgcactttatacaagacagttgttattcccagaaatttatcatgggcaaattcccaaagatttacaaaattttgagcaacattatgtctatgatccattgggctgttttattacggtaaaagaccaaaatcgtattattggtacgattgcttatcgggcgtatgaccatcgttttgatttaaatttaccgcttaatacggttgaagtcgttaaattatttgtactgcctgaataccgtcgtaatggcattgcaaccatgctatgtaaaatgttgtttagtcatgccaaaaaccatgctattactagtttgtatttgcatactcatccatttttaccggcagctgaagagttttggactctacaaggttttgaggttattcaacgggaatggaccgatacctatgacaccattcacatgagtaaatctttatagcgctttatcatgcgtatgaaatcttttttgaaaatgggtaggtggataacccataattttactgaacattgctgtaaaagctgccgagtgttcatagcccaaactaaaggcaatttccgtaattgagatattttcttttaacgcatttaaagcatagatgatgcagactcgattacgccaagcctgaaaggacatgccagtttctgtcttaaaccagcggtgaaaagtccgttcacttttattatggtcatgtgcccaatctttagggctgctatgaatatcaggatgctgcataaaatcagcacactgtttagatagcaatgtgttgtgaggcaatggaataaacagaggcagggctggtgcagcttctagttcatataacaataaatcgataagagaaccatcacggcctgcacgttggtagtcaataggcagttgatttgcctgaatgagcaattgatgtaacaaaggcgagacttgtataacctcgcaatagtttgcttgtcttggggcattactcacttctatatacaaactataagtactgactttagataaccatacccgatgtggtttgcctgctggtatccatacaccgctgtaaggtaacacgagccattgaccatcttcggtttcaactttcatgagtccttcgggtgcatataagaactgagcacggcgatggctatgcgtatctaacaaagtatcagcaggataatctgatcctaacgctagaaccgcttgaggtagatggtctacatcgttaattggaatattacgcatatatttttggctgaaaaaaataaaaagatggcttttctacgttagtttgccatatagctattttatatcatgcctctataaacgtgaggaagatgatgatgctatatgagctatttttatttgggctactttcaggcataaccacttggttatttggttttggcggcggatttgttgctgtacctttgctttatacagtcattattcaaaagtggagcaatgaaagtagtgtcggcatacatgccatgcaaatcgccgtagctacatcagcttttgtcatgctctgctcggcaagttttgcaacctttcgacactatcgttctggacatatagattggcaacaaatccgctttttatggggtggtattgcacttggtggaattgttggtgcggtaatggcctcattgtttaatggaaattggcttcgctggatatttatgagctatgtgttcataacgattattgattgttattaccgaccaggctttatggtgacctcaaggcaaaagcaacactatggtcaaaacagtgaactcattaaagggggcattattggttgggttgcagcacttttaggtgttggaggaagtgtaatgacggttcctttattacggcggcggggcagttctatggcagaggccgcggctattgcaaacattctcacgctgcctttgtctttaactgcaacgctgacctattgcgtattgtcaatttggcaatctacatggacacccaacggatttatcggactaatctggtttgaagctgctttatttttggttgctggaacatggatcggactatatttttcagaaaaatttatttcaaaactacctgatttatggcgggcaaagttatatccactacttttaataatagttctactcgtcatgctttttttaaattaactttttatttcaattaattaaagaataatctctcttaaatatcaaatttttaaatgctctaaaactgcaaattttatgcctcaaatggctttgaaaaaagtttaaaaattagacttgaaatatatagtggctttgtgccactatatattcatcgaaggtcatcagacaaaaagaggatgatatggctatccagcttttagatacggcaagaaacgaaattccagtgaaatttacgcagttttctggtggcgagcgtcatgttcaaattgatgagacaaccttaggttcactatatggcaatgtattggttcgtgcacacatggcctcaagtcacgatgtgatggactatttactacttgaaaatatattgctgactcagggtttaaccattgacctagaagttccgtattttccatatgcacgtcaggaccgtatttgtgcagtaggccaagcgttctcgcttgatgtgatgaccaagttactcaacatcaatgctgacaaaaaagtgggcaaacaaggcaaggtgactgtttgggactgccatagtgaagtaacgacagccttactcgccgccaatacttcttttagcgaagttgtaaacatcagttcagtagacatcatcgcaaagagtgaagcgctaagcacattgttaaaagatgaaaaaacagtgctggtttgcccagacaagggtgcaaaagcacgtacacaaagggtcgcagatgcttttaattctgagcgcaaacaaccactcactattgttcattgcgataaaaaacgtgatccagtgactggcaaaattttaggtacacatgtacatgcgactgatttatcaggcctcacagcggtcattaccgatgatatttgcgacggcggtgcaacctttattggtattgccaaagaactgcgtcgcctcaattgccataaggtcgttctatatgtgacccacggtatttttagtaaaggaatagaggtttttaatggactgttagatcaactgtttacctcagacagctttccacaacaaccatcagacaaaatttcagtaattgcttttgcagcaaaataaagagaataaagatgacgattaaactgaatccattaaacgctatcgatttttataaagctgatcacagacgtcagtatccagcaggcacagagtgcgtgtacgcaaactttacaccgcgttcatctcgactcgctaaaatgttgcctgactttgacgataaagttgtgttctttggtcttcagggttttatcaaacactttttaatcgatacatggaatgaaggcttttttaagcaacctaaagacaaagtcgtggctgcatataaacgccgtatggatagctcattaggtgaaggtgctgtaccagtcgatcatattgaagctttacacgatttgggttatttacctttacggattaaagctttgccagaaggcagccgcgtcaatatgcgtgtacccgtgctcaccgttattaataccgacccgcgtttcttttggttaacgaattatatcgaaaccgtgttaagtgctgagctttggaaaagctgtactacggccactattgcttatgagtacaaacgtttattaactcaatatgccgtaaaaactggcgcaccactcgattttgtacctgtgcaaggacacgattttagtagccgtggtatgagtggaatttatgatgcagctcagtctggtgtgggtcacttaaccagttttattggaacagattcggttgcttcaattgactacgcagaagaatattacaatgccacaggtgtgattggggtctctgtaccagcgaccgaacacagtgtgatgtgtatgggtacagaagacagtgagctagaaacatttaagcgtttaatctgtcagctttatccgtcgggtgttgtcagtattgtgtctgatacttgggacttttggcgagtcattacagaatttacggtggctttaaaacctgaaattttggcgcgacaacccaatgctttaggcttggctaaattggttttccgtcctgactctggtgatccagttaaaattatttgtggtgatccagacgccgaagtcggcagccgagcatataaaggcgcagttgaatgtttatgggaagtgtttggtggtacaacaactgaccaaggttataaagtactaaatgagcgtgtcggtttaatttatggtgactcgattaccctagaccgtgcgcagcgcattttagaagggctagaagccaaaggcttcgcttccaacaacttggtgtttgggatcggcagctttacctataactacttaactcgcgatacttttggatttgctgtgaaagcgacttgggggcaggtgaatggtgtaggccgtgagctgtttaaagacccaattacagactcaggtgtgaaaaaatctgcgaaaggtcttttacgcattgaagaaagtgaaaatggttttatcttgtttgatgagcaaacagccgaacaagaacaaggcggagcacttaaaacagtctttgaaaatggtaaacttcaatatgagtgtactttggatcaaattcgcgagcgtttatccatcgcataactgagtttagatgagccgttgcatgagtatcggctcatcattttcattgagaggctgaacgtgactattcaaaatgaacaagaattccttgccagttatgatcgccgagattatgacgcacctttactcactgttgatatggctattttctcggtattgaatggtcagttgcaggtattactcattaagcgacccaactttccagctaaaaaccaatgggctttacccggcggtttcgccgatttaacccatgatcaagacttgatggcaacggcttatcgtaagctagtcgaaaaaacaggaattgcttcaccttatttggaacaagttgcctcggtcggcaattccaaacgtgacccgcgtggctgggctgtgacgattttgtattttgcattaatcgattttaatgcctatcaacaccaagcgttggctgaatacagtgaatgggtgcctgtagcaaaagcacaagatttagcattggcgtttgatcataatgagttgcttaacttggcattagagcgtttaaccaataaaacccgttatactgcattgccagctagtctcatgcctgaattatttacgctgaccgagctacaaaacatttatgaaattattcttgggcaatctttagataaaaaagcgtttagacgccgtatgatagaagcgggtgcagttgaagaaaccaaccacagtaaaattgtgggcaaacggccagctcagctttaccgctatgcactcgattcttttgattttatatttcctcgttcactcgaattacctagaaataaagagggtgaaggcaagcaaaacaatgagctttctgactagcgcatcttaatgcacttttgatttataatgccgcgcttatgattgatgtcatgttttgatcagcactttgcctatgtcacacgtttctccctgcttccaacaaaatcagttttttatgttggtagaatatctcacttcactgcatgaaatttatcctgtgaaacatgagtttgcagggtatccggctgcaatgacattggcagatcgcgtacattcagatcatgatattgcgccacttgaagccagcaaaagttaccctgactcaatagagaaagtcttacacttttcaggtaaagcgagagacatacaagactttgagcgctttttagaacaagccaagtctgccaatattcaaaacttgttattgcttacaggcgacaaactcaaagaacatcataatggacgagatgggcagcctcgtagtcgttacctagagtcggtaaacgccgtaatggcagctaagcaacatggtggttttcgtattggggttgcttttaatccgtttaaatatgtcgaagctgagcgtgatgcacagtatttaaaactgcataagaagattaaagcaggtgctgactttatcattacccaattgggctatgacattgaagccttaaaacaagccaaatcatttttaaccaagcatgattattcgcagcaaatactagcttgcgtcatgccactgactttaggccgtgccaacttcatggtaaagcataaagttgcgggtattgtgattactccacacatgctaaaagtcttggcaggggaaaaacaggcagggcatacagaccgtgtttatttgcgctgcgctttacagattttaatatgtaaacacttaggatttgcgggtattcatttatctgcttgtcataagccagaagagcaaatgctgcttgaaagttacatcgagcaatacagacatcttaaccttaaggccttagaagagctttggagttcactttggcaagtcaagacaggcaaagagtttacccctgaaattgctcgtttttcacgtcagccaacatctaaacaattaattaaatatcgtcagctacatgttatgcatgaagcaatgtttggatcaaaaattgccaaaggcgtcggacgttttattttcaaagcatctttttgggaaaacgctttgatcgccaaactcttacttaaaacggaagtactgagtaaacatagcctagtcggctgtgaaagctgtggtcagtgccgtttaggtgacactttatatatttgccctgaaacatgtccaaaaggcttagccaatggtccttgtggtggaacaactttagaccgctgtgaatttggtgatcgtgaatgtattcattctgtcaaagcaagactagccaaagcggttaaacaaactgaaatattaaaagagaaactgattccaacggtgcctcttgaaacgagaggaaccagttcttggaaaaactggtatttagcgactgaggcttaagttttgtattaacccttgatttgaacttgttaaacaatcaaatgataggctaaagaacagcaataattaaaaaataacaattagttgccttaattatgtccagtcaaaatggctaccgaggagtatacttaaagcgaatattttgcgttaaaagaaggctgtctcaatgaaaaagttggttgctgcacttgctgtaattgttattttaactggatgcgtttacgaccctgttaattacgacaaaatacacgaccaagagttccaagaccacctcaggcaaaacggttagtaataaaaaaaccactcaatgagtgggtttcattgtttaaaaagcccgactatctaatatatctgcctagccttattatccttcattaatttaaattactattgtttacatgctcttttttgaaaagattcatctattctgcatttcaggaaaaaacggcacaggcagcgcttaaattagctctctatcaatctgattttaatttattcactctttaattgatggatggttggagcagttgggcacgtggtgcgaaacggttcgtatgaaaggaggggatttacctgatggtcttcatatcaatcaaatttactggttgatgcgtgaagcagacagagagcttccaaaaggtaaatcttacattcgatgtgagataagcgattatgaggcagatcagatacaagcactcttacgaagtcttttaaaatctgataaaacagattttacgacgaagtttgcattaatctgtttaatcaaaaataaagtagaaaataaaggattaggtaaagttgctcaagaaacaaaccaatcaaaagctcaagctgctattatggtaagttgcgctagattttatattgcaggtcatgataaaagattgaaaaatcaatagtgtcttaataatggcctggaaatttataaagttagataaagttgtttctcaaaaagagtgtaataattttcttgaaaaagaagagaataagaagcttttgaaactattaagaatacaaaaaacatgcgctgatggtgctataactctaaagctatatcctaaagaaggtgtgcttatagaagatgctttgggagtagcatatgcacttatcggcttgatggttgctaattatttgcaaatcgacgcgcatgatatttgactgtctagacggattgtggcatatttttgatatagtgttcgaagtgtaattaaagcactggtattaaagctcgccaaaaggtgggcttttttatatttgaattaaacttctatgaaaggtggagaaaattctcctgatatctaattttgtcttattaaatagtgatatatttagaatgttaaatttaaaatgagaataattatggcttatgtaatgatgcttgctcgagttttttcctcagaaaaatatgcaaacgaatttattaataacgggaaatttcgcttaaatactcttaatttctttaagggatataaggaagagctctctaataatataggggatcaatacgaaggcataagctttcgtgctacaggtgagcaagaagtcaaagttactatagaatataataatgaaagccatgagattgaggtaaatgaaatttacactcatgataattatgttctaaataataatattttctgtatgtatgccccagctgtagaacaagaaaaaaaatttactttagaggatatacaagaaattgttgcatttcaaaaagatgctgaaaacctaggaaattatttagttttaattgcaaatcccgaagaattttttgaaagatttgctaaaactgttaaaaagctggggtataaaatgaagagagaccttgtagagtacgttgattttaataacagtgtacatgtacctagggataaaattggctttgtcaaaagtgatcaattttctcatcaaaaagaatatagattgatgatcgatgatggaagaaacgtggatgagcatattgatttggaaataggttcattagctgatattacgtatttaattccaacagaagattttaataaatctttagaaataaaggttaaagaagaaaattaattttcaaaatgctcatcatttggtgggctttttacttttctttgttaaaataaaaaaatttaataatcggaaatgaaatggataaccaaaatcgaaatatttattataatttagaattattgcaggcaattagtaattggcaagcgggtagtaatgagaaaaaaggaaataaattaaaagaattatgcgttaatctccctgaaaaatttcgtttacttccaccaaacttggttttgtttagacaaatatccttagataacgtagggctatcgcgttttttaagagaaaaaaagcttcctgagaagatatcttcttggaccacagattataaatttgctgaaaaattcaaaggcggtgtaccttctgaactcggggattttaaagctaccatttttaaaaccacgccactaaataatcaagtaatagtaagtttaagtgaactgtataagtgttctgatttctgtaatgcaatgaaacttaataaaaataagattgataggtatcatgatggtgctggtaaatactgggatacccagtctgaggtcataatggcaacagagtatttggatcactcaaatatatattcaatgggtgggtattcagggacacctgagcaaattgcagaacaagcttcgagagaaaagaatattcctatatctttaactattgatgatattaaagaattgagtagggattacattggaccttggtggttaagtccagaagggacgagacgcgctgttgctcgtactttggaaattgctcgtaatagggggatgctctaaatactgtaaattaaatacaaaacagatggatctagtaaaatagtaaagagtttagcctcctccgagaggttttctttcgtgctatagtctagtctaatttaaagctggttagtaaaatgaatatctctgttggtggtgaactggatgggctggtgatagaaaagaaggaaaatttttgaaagcttctgatttagatccatcttttaaaaccgaatactacaaacagatttacaatcgcgacaatgtcgtttatcaattttggtagcctttaggttccgatctatgaaatgtctaaattagtattagatatcttaagagcacctaataactaattttatcgtttgcctgacgtattacggcgcaaaagagccctgctaaatatcgattattggcggggcttttatcttataattcttgatcaattgttttgatttcaagaaaaatatatgtgtgatagctttgaaaaaattatttcattattagccaatattgctacgattttgggcgcaatattggcatttgtggtttggagcacttggaaagaacaacaaaattacagctttacaagagataaaatattcaaatgttaattagcttttgcaaaactaatcactgcaatagaaaattatttacatatttatgaaaaagaggttccttttagccgtaatagaattaataggactaatttagagttagcaaatgttttattggatgaagtgagaaaagagctcgaccaactttggggaaaatatgaaatagctttgtatagtttggaagtattaaatattaaatataaaaaagaatgtctcgcaaatgtttctgtgattcaaaatcgtttagaaaaatataagcaaacttttaataattctcttacttcagaagaagttaaatcaagttcagaagatatttttggaagacttgcaaatgaaaaggctaatggtttagaagaacttaggaaaattagattaaagcagtaattttttgaaatagatcgcctaaagcggacttttaatggattgcatatatgaaaaaagaagtcggctttcatattcctgttcgtccaatgcttctttgatatagtagtctgctacagttaagtttttaaaaattattagagatcccgatagctgataatgtaatattgtttttgtatatatggggatagatacgtgagactaatacttatagtaattttaatgtcagttggaagtctattgcatgctgaagaaaacgaatcaacggtttgtgaaaagctcaatagtgcagcatatcaaatcatgttagaaagacagtctggtataaagcctcttgatttgcttgaaaagctacttattccattagatcgagataaggaaaatttaatactgaattaccatatcaatcacttttttggtcatgtaagtggtttggcttatgagacacctctctatacaaaagaagatgaaaaacaaaaagcggctacagattttggtttgagaattgaaagaatttgtagaaaagataagacggcattatttgctcctccgcgatttcagacttttgaggaatagttagcctaatgcaaaatcaaaatgaacagattaataatgttgagcaattagataccgagaacgagcaaaagcaagaaaactcggtgcttaattctgtgaatcctgatctagttgaagttaaagatttaattgtagaaatcgggaaagatatagttgattttgcatcatctgttttcgataacatcgatatcaatttttaacttaagagctcccgaatagtgagtttttatatgttataaaaagatttcccataataaggagatcgaagtggaacttacgcaaattaaagtaacaatagatcgagaatatgatctcttcgtaaattcgcacgaatttaagacgtatcagcacgataaagaaaagcaagctagatttttaggccatgcattaacaacattgaaatacccttatacgaacatcattactttaggtggtggtcgatataaagttgttggtcatcatgatttaaatgttgatatcgatctattccaagctccatctttcgtatcaaagcaagcatttaatacttggtttgctaatatcctatctcaacatttatattcttaaaatatattctaaatacatattttaacttgtattatcactatcaaatactgcgctgaaagttttttgtttttttatggcccgtttctgattagaagcgggttctttaatttcgtatttatgtatatgtattagatgaaagtatatattgcttttatcacatagcttattgtttacttcgctggaaaatattccttttaagaagttaataaaatgaaaaattatttaatagggttagttatttctttaggtttaactggatgtgtggtattaccaaacatcgactattcacagccaaaagttgaacgatttaatccagttaagaattggattagtgtagattctgcttcagttaaagatatgcctaatggtaatgaaatctttaagttgaaaggaggtagtgaagtttatgtattcagatatcaagatgaatgggcattattgactcctgcctctgataaacaacaatggattaactttagatatttatgtggttttgctggttgttatactccaccaattgtttatagaaacactaaaaggggcttggataaccagcaacctatttactcagttcaacaacatgagcctaaaagatatagcaataccaagactagaagcatatctactaacactcgtacttcaagaagctatagtcaaacgaccaatagttcttgttattgtacatctggaacatattgtgttgggccgagggggggacattactgccttaatagcacaggttcaaaaagatatcttccacgataaactgtataagcttcaagaagccccgctaaatatcgattattggcggggcatttgttttataataattttcaagataattagttgtttatttgaagttttatgagtgaagagattatttcggcaattgctacaattaagggtgcacaaattcaagcttattacacattaatagcatcatgtgtaggagcagttggcatagtagttggtattatactttcttggtataccgctttacatttacaaaaagtatctcgtttagcagaaacgagaaaaactgtttatttagagtttgctgaagcatattctaagttaatagctggtttacaattaattcaaatcgaaaagcataaatatcaaagtgagctttttagtagtttttctaatttctcaacttgtacagacaaggttatgtttgtctgtaatacaaaaactaaaaaagaagttgtttgctatttaaataatattttaccaaagattgaattaatcatatttgaaatcgcaagttatttcgatttatctcaaagtttagaagttttagtaaaagatcatcaggaaagtttagaaagcttagataggttttatctaaaattagatgaattacatattgataaccctgaagatgagcgatctaaaaatatatttaaattaatagattttaaacttaaacagtcagagaggttaatacaacctatatcagaaaaagaaaaagagcttgaagaaaagcatgaagaaattgccgaaaatattaaaaaatttacaaatgaacttaatgaaggagttactgaagtaatttatttattaaggaaggaaataggggctaagacggatattcatcttgataaaaaattatcaataaattatcagtctcaacttccaaaaaaagaagatgagttgaagtaattttaatttaaattaatgttaaagctcagtacaggttaaattgcctttaggtgtttttttaaaaggatatattattaaaaaatgaagaatttaagtataggattagttcttatgatttcattatttggttgtgccaattccaccgctaagcatcaagacaaattcttagcgcatattcatgaaaatacaccaaatccttacaaggaatgtatggtcaaatatattaaagaccattgggatgaagtttggaaaacttacaatactgaaaaaactggggaggctcgtggtgaaacagatatagtcaatttcatgattggaaagtatctatctgaatgtaaaaaataatacatttgagctaaatttatttttatgtatttaaggctttcaaagccttgagttttcagggttttactaatagccgcttttaagaaagaaatatttttaagtaggcagtatgctttaaaattattttaatatttgcatataaatgttatagaaaaggatggagttagtaataagaataagttcaaaggaagcacttaacctatcttcttaaaattcgatggattccgttaaataggtaaatgatgaccgtacttttagaaaaagatttaagcccatctgagtttacattgttttctgaaatattatggaaacttggctcagggaaagggcaatacaatttacgtgaaagtattcttgcagatattgccatcttgttgcgggctgatttcgcggcatcttatatttgggattcaacccataacttatcgagagaaggcgttatatggaaaatcgacccaaaagccatgaaggactatgagtgtgtttggcaatttaatgatccgattacggcacagcttcgcaaacgtcaaaaaccaacctttgtaaatgaagtcatgcctctcgcagacctaaaaaaaacaccgtattacaatgagtttttaagagcctatggtttatatcacggcataaatatttattttgtccgaaatggtatggatattggtgatttacgtatttggcgtgcgaaagacgccgacacgtttggtgaacgtgaaaaaagaatattaaacctgcttgaaccttattttactcaagccttaccccttgatttatcaacccaatacggtttgacttcgcgtgaacaagaagtggttcgcttggtatctaaaggtttaagtgataaagatgtggccaatttactggatattagctttactacattaagaactcatttgaacaattctatgagaaaaatcggctgtaataatctcactgaaatggccttgctcattcgacattaaagtttaagcaatcctcaattttgaggatgcgaatgaatgagcaatttgtactaagttcctaaaattaaaacttaaagggattaaaaattactatgttaaatacaaatgaaaaaaataatgcgatcgaatcacttgatctatcaaatgcttcagtagatatcattactaaactcattcatgagagaaaagtatcttgtgaagaacttgtgcatcattacttcgatactattgaaaaacagcaagctttaaatgcatttattagcacagataaagcttcagcaattcaacaagctcaatattgggataaatacctactgagtggaaaaccgtgtccagctttgatgggtattttaattgcggttaaagataatattcatgttgcaggttttccaaatagtgcaggtacgccagctttagctcactttaagcctcaaacttctgcccccgttattcaaaaactcattgatcaaggtgcaatcattgttggtaaagccaatatgcacgaattagcctttggggtaacaggttataatactgccatgcatatagaaggtgttgtgggtacacgaaatgccgtaaacccgttacacattgctggtgggtcttcttcgggtagtgcggtggctgttgcagtgggcatggttccgattgctatgggtacagacacaggtgcttctattcgactgccaagtgccttaaatggttgtgtgggttttcgtccaacggtaggacgatattcacaagaaggtattaccccaatttcacatactcgtgataccgctggcccaatagctcataccgtatctgatgttattttaattgatgagctcatcactcaagagccaagaaaagaatcattacagtctcatcaaattcggctcggtattaattcatacttttggaatcatttagatgaagacgttcatgaacaggctcatattgcacttgagcttttaaaaagtgcaggagtcgaaattattccagtcgatatgccaaatttagaacaactcaatcaagctatttcattccctgtggctatctatgaaggcaagtatgacctaattcaatatttgaaagatcatcatgtaaatttgaccatagagactgtagtcgatcagatctcaagccccgatgtacaggcaatttttaaactgaatattcttcctgagttaattcaagaccagacggggcaacttgttcctgttttaccttcgtatgaaaaagcgattagtgaagctcgtccacaattgcttgaactctaccaaaacacatttaagacgcataacttgcatgctttattatttccgacgtcaccgattgttgcaccactagcaaacgaggaagtctattcgattgaaactttccagacactcatgcgaaatacagaccctggcagtaatataggaataccaggactgagtttacctattgggaagggcgtgaaatcaaaactgccagttggacttgaaatagatggcttagctcatcaagatagcgaactgcttgccataggaataactttagaagaaatttttaaggttttaaatcaataaacaaaaccacttaaattactatttttaaaggtttgttcgccttttaatagtaagtttgttttatctaaaaataataagctattttacctattgtagtagcttatttattaaacaatcattacttataagattaaaaattctgtcagttttactattgttaatttaaagaaatataatatttataacttatatatcttattcgtataactataacaatttagattgttaatcaatttttaaattacatattattttaattaataatacttaaatattacataattaaacttatatttaataatactgcaataaaaggctatttaataattttgaaaaattatattttctaagtgataattcatttataaaacaataacttgagtttgtttttttaaagtaaatttatatcgaaaatttagacaaattcgaattacataatttttaaacatagtttatataatatgattaattgacataaatagaaaaaatatatgtcaaagaggtcaatgatatttaattcacttaagaaccataatttgcaccaaattttacgctgtcacgattcattgaataaaaccaagtgaaaagttacgtaaaaaagaaaccaataattttattggcttaaataaaaaatcgaatattacaaataagcggaatgattatggataacgtagctcagctagaaactgatactaatttccaaagccgaaagaaaataacttggggtgtttttagtgtcctgctgttatttttagttgctggcatcttatattatttttttgtataccgattctatcaatctactgataatgcttatgtacaagccgatgtcacttgggtgatgccaaagatttcaggcgaagtgatggagttattaattaacgataatcaggtggtaaaaaaaggggaaactttagcggtattagaccatcgtgactaccaagctcgatatgaccaagcccgttctgtggtcagcctaaaagaagcagcgcttggtgtacaacaacaaaatgaaaagtctgcacggtcgtcaattattgaagcaaatagtggtgtagtggcagcgcaagcagacctagcgcgtttgaaaaaagagttcgagcgttatcaagatctattaaaagatggcgtaattacccgacaaaattttgaagggattcagtctcaatatttaacggctcaggcacagctcagcaaagcgcaagccgccgtaaatgcagcagaagctcagttggggagtttacaagcgagtcgagcgcagcttttagcagatattcaaagtgcccatgcaaatttaaacctgtatcaggtcgatttggcttcatcaaaagtggttagtcctgtaagcggtaaaatcggtagccttgcaatccagaaaggttcacgtgtttctccacaaacccgcttaatggcgatcattcctgaaaatagtttgtatgtacaggcgaacttcaaagaaactcaaattgaaaaaatgcatattggtcagaaagttaaattaaaacttgatgcctatccgagccttaactttaccggaaaaattgagagtttttctcccgcttcaggcgcgactttctcacttatgccaccagacaatgccacaggcaactttaacaaggttgtacagcgtattcctgtacgtatcgccatagattcaagcccacatattgatttgataaaacctggaatgtcggtgagcgccaccgttgacctaagaacttaataataaaattttgggtaatcataaatgaatgagcatgttgaagccgagtggaggtttcccgcaaaaactgcatgggcaatttttgctgccatgatttttggcaacttcatggcgattcttgatattcagatcgtggcaagttctctaaacgaagttcaagctggtatgagtgcaagccgttatgaagtcacttgggtacaaacggtttatttaattgccgagattattgcgattccaatgtcgagtattgtctcgcgagtgctttcaacacgggtgtattacaccatgtgtgcaataggttttacggtcagttctttactttgtgctttgtcatggaacttggaaagtttactggtgttccgtggcattcaaggctttatgggtggcgggatgattccgacttccatgacggcgttgtatttactgtttccagaaccaaaacgctcattacctttggtcatgtttggcatgatcagtactttaggtccagcaattggcccaaccattggcggttggcttaccaataacttctcatggcactggatgttcctgatcaatattattccgggcattatcattgctacggtcatctactcaggtccaaatattgaccgtgccaactattcactcatcaaaagcatggattggtttagcttggtgggtatggcgatgtttttgggtgggcttgaatatttccttgatgaaggcgcacgacatgactggcttgcagacacaggcgttcggattgcttttatggtctgtgttgtaggcggcatgattttcttctctcgaagttttactcagcctaaacctttgctcgatttatcggtatttaaaaataaaaactttaccttaagtgccattacaacgtttgtgattggcatggcgctatatggcttgggttacatgattcctgtctttcttgggcaagtccgtgaaatgaacagtagccaaattggtcacgtcatgatggtgacaggtattgtcatgttctgctttgcgccatttcttgcgtggctcattcccaattttgatacccgcaaaaccgtatttgtcggaatgattctggcgggctttggtgtctggcttaattcacatttgagcattcatagtgattatgactttatgttttggccgcaaatttaccgtggtattggcctcatgatttgcctgattgtggtgtcacatttggctatgagtacattaccactcagtaaagtagccgatgccagtggtatttataacctgatgcgtaatatcggcggcgctgtggggttagcacttatcaattcatccttagattggctgaccgccatgcatgtcacccagattaatcagtcgatgacaccgcaaaactggatatttacagaacggcttgaccagcttacggcgcaatatcaggaagtcggtgcaaatgcccagcaaatcgcgctcagcgtgatctatcgcgatattcactttcaagcactgacatcgagtttcaatgacttattacgcatgctcgcaatcattatgtttgtgaccgcctttttaaccatatttatggatcgggggaagaaaatgaatatgtagtgatttagaaataaaaggcagctttcaaagaatgaaaacaatagggcatatcaaaacatatcccttcatagaaaaagaacattgatatgagtttcgaatatcgctgtacgagataggggaactcacagatctggatgtgggagattaaagtattatgattaatacaacatataaactgatttcaaaattgaacctgaaaaacgcaacttatgggcaatattttgaaaaagagcaaatcgatactgaacgattaaaagtgatgtattccatttacgagcagtattatgaaaataccagattttctattttcgtagatgattttaaaaataaaagcggtgcgatcttaatttttgactcagaaacagatgagattgtcggtttctcgacggtagttgtgcagcatttctacttaaacggtaaagattacaccgtgctctttagcggtgatacggtcattttgaaaaagttttggggcacgcgcacattgcaaagtaccatgctcaaactcatgatcaaacttcgaattaaatatccttttaatgaactttattggcttctcatttctaaaggttataagacttatctcttacttgccaataactactatgtgtattacccaaacattaaagatgaaaaccaacatctttcggaagttgttgaacattactgtgaaaaattctttggcgaatactacgacaaagaagccggcttactcaactttggtgatgactatcaaccattaaaaggcgaagtcgcaccgattactgccgaaatgagagaaaagaacccaaatattcatttctttgagcagaaaaatccaacttggagagccggtacagaactgccatgtattggtcgacttggttggaaagatattgcccgtttccctgtaaaactgatgacgaagccgacaagcaaaggaaaatttgaagcgcagttaagccataaaacaaaacgtagagaggctatccaatgaaatctaatcaatggttgactctcggctcgcatcttattttaaaaaaatggtgtgatgcatctgaccgtaatttccaaaaacagtttaatgctttagagaccacgcaacgtcaaattttgcattcgatattacagacttctacatttgccaaagataagaaagttcaaaactatgagcagtttgtaaaagcatttcctgcaactcgctatagcgcttggcgagaagacattcagcgttaccgtgaacaaaagctttcactctctagcagtaaactggttcgtttccagccgaccagtggttcgagtgaacaaatcaagtttattccatacaccaagctgtttttagatgaacttgaccatgcaattgcaccgtggatggcaagtttataccgcaaatgcctacagttgagttcgggtacacattattggtctgtgtcatggttgcctgaaagtcagcgtgaagttttaaaagacaaaaatctaaatgatgacagtgcgctactcggtataggtaaacgcatactgtctaagtttacccaagcggttccaagtaacgttgcctttgcagcaaatgctgacgatgcactgtttgctaccatttgctatttggtcgcaaaccgtaacttagccatgatgtcggtatggagtccaacttttgcgctgcaattacttgaacgtttggagtctatgcaacaagacgtggttgaggttttgcaaagtggtaaatggggcagtcgtcaggcttccttaaaagaagtcactgcaccgcatagccctgaaagtgctcaagccttaattgcaagttcaaacggcgaacagatcgactttaaaaaactttggccaaagttaagtctagtatcgagttgggatactgcaggttcaaaagcgtgggccgaaaaattaaaagagaaattgcccaatgttcagtttgaaggtaaaggcttatgggcgacggaaggtgtagtcaccattccctataatgaccaatacccattggcttaccaaagtcacttctatgaatttgaatatttagaaggtgagaaacaaggtcaaatcgttccttcatggcaacttaaacaaggtgacgtggtcagcccgctgattacttcgggtaatggcttactgcgttactgtctagatgactgcttaaaagtgactggctttttagagcaaattccgtgttttgagttccaaggccgccgttttggggtcgatctggtcggtgagaagttagcacctgaaaccgctcaacagttgttgtcgcagttaaacgaaacggaatcaaaagcaatttctttactggcgattgatacccaacaacaagttaaaccattttattgcgtgctttttgaaggtgaaattcatcacagcattagcaatgaatatatcgacagtattttacgtcaaaacttccactatgaacttgcacgaaacttagggcagctcgaccagcctcaaattcgccaagccaataatggctggaatgcgtacaaaaaactggtcatgtttgatggcattatcgaaggcaatatcaagcctgaaccactcaaaaaagtcaccctgaatagtttggaacaactatgaaagggatgaagccatttaatacccggtttttaacacttcgacacgccttgtatttaggcgtgttgttggtgtcgaatacacatgccatgactttagatgaggctttgtcagctagtttaaggcatgaaagccagcttgaagtgagccgtttaaatgtgaaccagtccaccgctatgcttgaacaggccaagcaacgtgatggactcaaagtcaatttagtcgggcaacttgactatgaaagaataaatacgccttcacacgtcttgtttccaaccgaaggaaaccgtaaagggcgaagtttgcaattgcaggccgattatccgatttatacctctgggcggcaccgtttagggatagatattgccgaaagtcagctttctgcccaacaccaaggcttatcagatcaaagatcggaaaccattttaaataccgtgatggtctataccgacgtattaaaaaagaaagccattttagaactcagacaaaagactatggcaaatctgcaacggtctttatatgaatcaaagcgccgttttgatgtcggtatgattacccgtgcagacttggctcaggttttagctcaagtcgcacaaggtcaagccgatattacacaggcgcaatctaacttaaccgtaagcgaagcacagttttatcaagtgacaggtataacgcctgacaaccttgttccaatcaatcaattacccactattcccgctaacctagatgaaatattggctcaaaccaagaaccatccggctttaatgcgggctaaatatgaaaagcaagccgccgagaaacaatacgctttaactaaacgcgaactctggccaacggtcatgctgaccagccgtgccggaaagcaagatgaagcgagctatattggctctgaaagtaataactatatggttggggtacagctcaatgtaccgctttatgacgatggtttaaatcgggccaatgttaaaaaagcacaggctgatatcgatttggctgcgcaaaaaattcgaagtcttgagctggacttgaataagcgtacccgtaccacctatgcgcagcttcaaaccattcgacaaaataaagacgcattggcaaatgccatagaggcagcgtctattgcttttgtctatacccgtaaagagttcgatgtcggcaccaaaaccacgtttgatttgctcaataccgagcaaaagctactcgatgcccaaacccaaaaaaccgtaaatgaccaagacgaagtggtgtttgtctatcagctactcgaccaaatgggacgtttaagcaatttggttcctatgcagaccgcacaacaggtgaataatgaataaaacaaatccaccacttactgataatacgcttattacccgtgaagcgactttggcagatgacgaggctttacgagagttaattgcggtaccgatgaccaccaaaggtatacaaatcagctttcagcgtgaaccgagttattttaaggcgtccgacatcgtctatcggcataaactacatgtcgtgattgaagataccgagagtcaaaagaaagtggcctgttatagcaatggttatcgtccgtgttatatcaatcggaacattcaaaacttacgctacgctggggacttacgggtagatcatagctatcgaggtaaatcactggtgaaggtcttaggcaagcatgtaaaacagactatgcatgaaccaaactatagccaaatgattatttttgatgataaccatgccgcacgcgccgctatacaaacgggcaaaacgggaatgcccgattattatgatgaagggcttatagagacactcagtctgacgagcactggcgcaaaacgaaaaatcacggcatttctaaagcagaattctcagcagagtaaccttcaagagatacgtacatgtgtcgctgaagctaaacatgtaccagccatgaaccagtttattagcgacatggcagaacactataactttattccagcctataactttgaagaacttgcccaaggtcatcagtatttttcagggataaaactctcggacttttcactttattttaagggcgaaaagctagtgggcatgtttggcttatgggatcagcatagtattaaacaaaccaagattctaaattacagctcggccatagctgtgcttagacccgtctataacttattgacgccaattaccaaaggcatgcgtttgcctaaactcggtgactctattcagtaccatgtgctacatacgcttatgtgccatcctgaagatttggctttgcatcataaaatgctcgaagatgcctataacaagtcaaaacagcagggcgttggtgtggtgagttttacactttcacataaagacccgcgatatcagttaaaccagttttataaaggtgaacgtttaacgggtatgcatggttttattagctttgaaggtgaccctcggccaagttttgataaaaagctgattccatacttagaggttggacgtatttaacttaaaacttgaagtaattttaatgaagcccacgaaagtgggtttttgttatatttatgcttagtcactaaacatacatataccgccactaccatacaaaccgaaatttaataacatggtagttaagtgatgaaaaaaagtttattgggcggccttattctgtctttgtgtacaactccagcttttgcattaaatattttattggttaacgatgacggcctaaccagcaatatcaaagcactctatgatgaattaaaagcaaatggtcataacgtgcttgtgtctgtaccgtgttcaccacaaagtggtcgtggtggtgcaattgtgatgtacagctcaacaacaattaccgcggataatgataagcaaattgcggctgaaaatggttgccacaatggcgcagcaccaattggcgcacctgcggctggaacctttaccaaagcaggttataccaatggcgactggaactacacgcatggcacaccagtcatggcaacagtttatggactagatgtagttgcaccaaaacgctggggtaaagcaccagacctagttttatctggcccgaatgaaggccaaaatgtcggcaaagtcgttgtacactctggtacgattggcaatgtacagttttcggcaggacgcgggattccgtctattgcattaagcgccgataccaacacggtagatgacaaaactttaaacaaccctaactctgcgattgtggcaaagcaaactgtagtgttattaaaagaattacaagctaaggcaggcaagggccaattgttgccaaaaggcattaccctcaatgtgaattttcctaaaaatttaacaaccagcacgccgtttgcattttcaaaaattgggacttatgacttatataagctgaaattccaagtgactaaagacaataaaggcaacaatcaatttggcttaggaatcgatgcggcaccatcggccccaactgcctctcaaatgtcggatgaaagcgctgtaatgcaaagcaaaattgctgtgactgcaatgcaagttgcttatgaccaacgaccagcaggtcaagaatggcttaaaatccgtttaaaaagcttatttaacaagtaaggagcaagaccatgaaacgttgtttattggttttactccttgggcttggattggcggcttgtaatgacaatgatcatgatgaccaagtctcgactgaaaaacctgtactaacgccgagcttagacgtcggaacttatattattagtaccgaaactgatcaagaattacctatggcgggtaaatactattctggtgcagatgggactaaattattggttttagatgatgacgaaaaccgtgccaagattgtgatgagctatgatacaaaaaccaaagcttggcgaagcaaccagtctaatcaagcgatgacagtcgaattagcacattatgaaaaaattgctgatcaaaaacttttgcttaatcaactggtcggcacctacgatttatcgtttccagatggaacgacggtaaatgccgaggttagtgcacaaggtaaaattgtctcgaaagacccgaattgtgtgtttacaggtgttattactgaaactgccttagccaatacagcaaactatcaacttaccgataataagtgtgatgcgctaaaaaataactcgaaaggttatgttgtggtagatgaagacctagaacctatgagttttagacttgtatctgacacgattgcatcaaaagacatttgggcatttgcacaatcttaaaaataaaaagacaacggatttatttcgttgtcttttatctcaacttatcttgcgccgttgaaacaattaacatggtttgaaggtaataatcgacacgtgattgattactttctttatgtgagttgtgcgcattaaaggctgcatcatgaagtttcacgactcgagcgatcggatttgaactacaacgaattaaatattcttcgcgtgtttcagtttctcgtttagttaatgcatcaaccgcatcacgaacttcttttccaaataagctttcgattttggctagggtaagaggggtgtcttcaacactatcgtggagaagggctgtaataatatagacttctgaaaattggtgctcaattaatgagttgaccacacctttaatatggtaatcaaagtaatcatgaggaccatacttctgaccttgatgcgattcttttgacaatttctctgccaattcaactttattttgagtcattttttgctcttattaatttaagtatataacgcaacctaatttgtgagatgggtcgcttaagtcataattttatactggataagctactttgttgtgaatactctcgtttgtttggtgaatctccacaatgtaatattcaacatatgaaaacggataaataaattattgctatctataaatatgagatgcgcaaaaatttgctcacttttatctaaaataaatcaaattgagcaaatatattcacaaaaagtcttttttatcgtatttttgagaaaataattactcatttatacgaatgaaaaaattaacaatacaaacccaagaccgtcagcagattcttatagatttatataaacaatatttgttgagtgagattactttggggcaattgctatcgtatttacgcaaaaatgtgttgggtttatcgcaagaacaatatgctaatttggtgggtataagccgtcggactttaacggacattgagcaggataaaggtaaactcactcagtctgtgttagataaagtgtttaaaccacttggtttaaaagcagggcttgtacctacgcatgaacatattgttagcaaaattataaagccaaacgagtaagaaactatttaaatgttcacaagggaacgcttgtgaacactaaaatgataatttttgaaccaatctaatatataaatttttgcaactttaaaatttaacttaatgatataaaagcagattgtaaatattacttaagaatatccttaattatgtaattaaatgaaaaataataattatttaaatattttctagccaatttcacattgacacttcaaatattgaagattaccatttgcgggctggcctacattgccagtcggttttagcagaccgttcactccgcatcagaatttattccttctgaggaatagttttgtgtgtaaactcccagttccctcccgtagcggtaggacgggagagggacacctacgggtgtgctagttgagtgactagtctgctaaccctctttcgttctgccaccataaatcttatgctctggcagaactccataaataaggagttggctttgcgcatccatcatttcttggcaacccttgccaaaagctataacaacacagcttaaaacatttaacgcagcttgatcgccgtaaggctttttcaggctttagctcgttattacttaaaacttcgaacaactaaaacttgagatgtgctgggcacagtctttacggctttgctatgcctttttttctcccaaaaaagtcagcagttttttatatctcatttatatacaacaaaaatttaatttataacggtaaaaatatgccaaatttagttctcccaacacgtgcattaaaagttgtaaatacatcaattgaattatttcaccgccgcggttttcatattgtgggcgtcgaccgacttgtgaaagagtccgaaattaccaaagcaactttttataactactttcactctaaagaacggctaattgaaatctgcctaatggtgcaaaaagaacgactgcaagaaaaagtggttgctatggtcgaatacgatcacgacacaaacgcaatcgataaactcaagaaactctatattctacataccgatgtagacgggctgtattacctgttatttaaagccatttttgaaatcaaaaatacctacccaaatgcatatacaaccgccgtgagatatagaacatggctaatcaatgaaatctataatcagcttagagtacttaaacccgatgcttcctttactgatgccaaattatttttatatatgatcgaaggcgccattattcagcgtttaagctcggatgaggttgatgaaagaatggttgaggtgtttttgagggggatgtcggcaactaagatttaagctgaagagtagcttttagatatttttgatataacactgtataaaacttaaaacggtagaaagactaagttctctgattagcaagctctacttagaagcccaaataatacagtaacttatggtttatcccacaaacaccccaagctggggtatatttaattaaatgctttatgataaataggggatgtaatgtatagtaaaaacaatgtcttgcttccaagcaaatcagcatattcattagaagaagcatgtaaagaattgaatttatttttcaatcgagatgatatagatattagatatatattagatttagttcatcaagggcatatttggatgcatgcaaaatttagtaagaataattatctttttgccatccctatggaatgggagttagatgaaaattttaataatgaaaatgaaaagagaatagaagaaatacttttttttaatagaatgcttaattatcaaaatatttataataaaatgggggattatgatctatatcttaagttaactttagagacagcattcgatttgcttaataataaaattattataaaaccattaatattagatatttatgatccgtgtgaatatttttacctttgtgataattatcttaaaattgattccggatattatttggaatttaaaaaatatcctaaagggcttaaaagagatgagtattttgatacggttcttataaatcattcagaaaaagaaattattaaaaaaatgtctttttttgagatatatgatgaaatttataatggtacagaatttgccgatctatactacgagtttcctgaggtaatggagattgtagaaatacaaaataggcacgcaactgatagaatagataaatttaagtggaaaaaaggatgggagaagtattactggtacggcgataaacagttagaggattttgaaatggaatataatttagaagatatttatattctaaaagaagacatggattttttaaaaagaggtgaaagtagaaaaattagggaaaggaaagattatatgtcacctcatattagaaaacagtatgaaaaattagatgtaagatcaaattatactagtaaaaatagcatttctaataaatcaataaataaaattatctatgctttggctaatatggcaaatatagacatctcccaacctcaagctgctttttctcaactacaattatattgtgaaaaaaataacttggagttaccaaataaggatacatgtggcaaggcttttaaagatgctaagtactattttgataattttaattctaaatagactctaaatagaacaatgctaaaaagactttacacatactagcctcatccccacgatgaggcttttttatgagtattacagttttaaaaaatgattcattaataaattacttttctgatgacgcggtagcaacagggcaaattcaactgaccgatccaatgcaattactagcagatccaaatcttttacgtaatgctttactgacttattcagaaaaagtgattgagctagagcacaaagttgaagttatgcaacctacaatggaagcatttgcccgtattgctagagccgagggaagtatgtgcctaactgatgctgctaaagctctacaacaagaaccacataaatttaataagtggcttcacatgaatgactggatttacaaacgtcatggcagcaaacattgggttgcttatcaagagaaaattaaagcgggatatttagaacataaagtaaaggatatccagctgcctgatgggacgatcaaaatcacagagcaggtgagagtaacaccaaagggtttaaccaagctttcaaagcttctaggaaacaataatgcataatttaggcaataaaaaagcccttcagagaattcttggcggaatcaaagagctttggattgctaacacaaggagtattaacactgaacagtatcgtataagggtttgggaaaaatcaagtctacgatattaatgatgttgctgagggttaaggtttactaacgaaatatatagccagcttagagtgtttaaatcagatgcttctatttacgttaaagcaatttaaaaagccctgaatattcggggcttttcatttaaatttactttaatgattctggtacataatttggtgaatcagtaccataaaatgactcaatatcggcatcatacaaagacttatatttatcttttgatgcgacatctttagtttcatcaataaatttctgtatttttgctttatagtcagtgtgaccagctttatacatttcagttaaatatacaaattcggcgtctctgtactggggatcatttttgctagatgatttactcaattcggtttgtatgagttgggcagaagcttcgtgacactgttgaatttttactttggcctcatttaatttttcaagcaaagtacatctaaacattatccgttgaggcaagggtttctctttgatttgttgctcatttaactcataagcctctttatacataccagacagcatataaatattcatcaatgccatttctctttgttttttagcagtaactttcttaatttcaggtattaaaggcgctaaagtttgttttatcttttcatcttcaccagcagtcacaacttcatttgtgattgtttcatatctatctaaaatcgctttatcacttgcggataattccgtttttacgttttgagagctgcttttctcagtagtatctacctttgcttgttcatttgatgccttgctacaagcagtaactccaaatacagaaatgagaacaatagtactgattaattttctattcatgatttacgtcttgatgctgaatttaaagtaaaagagaagcgagtgtgaggtgggtttggtcgaacagtaccgccatcaaattttgcggtgtaacccatagttaaagttgcttcaatagttgataaatcaggtttaggtagagttaccttacactgacctacaggctccttagagttttctgttgaccatacgccttttcccttttccaaacgtgtttttcctaagctttgattgttatgcacaagatcaagtgttgcgtatggaaaaattgtagcatcaccgcttaatgttggaggaagcatagaaactgtcacgaaaagttcttgcccttttagaatataagtaactatgaaagtacatacacctgaaacagcctgactaattgccccaaaaagatttttcttatcttcatcgtacgggaaaataccatttgtaaattttacatatttcgttgtgttttgctcgatgtagtagttctcatattcatctttaacaaaactgtctgtggctggttgcttctgtgaaattggagctgatgaagattttgcagccgatgatgcagcgccaccaccgttatcctgaacaactaagttttgttgaggcagtaatttacaaccacaagagagtgaatcatttactcgggcagcagctttcccaaagatttgcatgcacggatcgccagatacaatagttgcaacgactttatgagttggacaagttgctttgtcaccaacacaggcaacgggaattccgtcaatcaggaacatattattcccagaaattacttggccaccaccagaggtcgggcagcctatagttatatatggtgttgtcaaaactattccttcttattttcttgaagtgccagaatgatagcaaagaggggtagacagtgctgtatagttttatttatcaggatgcacagcccatacgatcaataataatatgatttaaaaagataggcataggttctttaaaataaatttttatgtcattctctttagagattaaatgtttattcgagtaactttatgaggatggtcgttaaaaatgaagtctttccttatatatgattcattgataaaaagatatgttttattaactgtagggctaattgttattgcctttatgatagctatcttttttaaaggggaacttgaaattgattttgcgattggggctgtttgcggctatttaaatatttttctattgttaaagaattatagatttccacttattcccgaagttaaagaagatagtgatgaccttgttatgtatacaagggttagtcttcttattttttttgttttgatagagtttggttttttacttgccgcattattttaaatttttatgaatgtatgattaagaatgaattagaaatgattagagttttgctgctaattaaataaacacggatatatcaaaacatccgtgttttaaaagatttaaaatgaattatggtttttctctgccaattgcatggtctgtttaagctgtttacggttgaaacctaaaaactcaatcacatttctaaacagtgcgggtgctttggcaatcggagtatttattttaggtacaacagtcatatctttacgccgttctatactttcaactacacccgagacaacttcatcaatagttatatatttccaaatacccgagttacctttccacacagctttacctgctgggtcattttgaatactgtccatcattggggtcttaaagaaggtcggatgaaggctaccaacatctatatttgaatattttaattctaagcggagactgtcacaaagtgcccaaacgccggctttactcgaagtgtagtgagtgtttaatggggagtggacgaaagccgccattgaagacactgccagtaaatatccttgtgtttgttttacatagggtatagctgcgcggaaagtacgaaatactccagtcaggttaatatcgatggttcgctcaaaggtttcaggagccatatgttctagtgcttctgttgtagctatgccagcatttgcaatcaccacgtcaattttaccgaagtgttgagctgcatttgccatagccatttctaggctttccaaagagcgtacatcggccacccaacctgcggcaatgctttgcccacctagctgttttgcctgactttcaactttgttaaggtctaaatctaggagtgctagttttgcgcctttggcttgtaatgcttgggcaatcgcaagtcctagtccacctgttgaacctgtaattacgacaactttatcttttaatttgtatttagacatatcagatttccagacatttttataaatgagctttaaggcaatggattatttctggacaggtttagattcactttcaagttgttgaagtaatccctgtaatttcttatggcgtacaaccattgcatcactagctgcattaaacattccgcgtaatatcgagaacggaacccagcgcactggagcaaaaatgcgtggctgtcgacgctgtacaccttttacaatggcttgcgccatatattccggagaaataggcttgcgtaaccatgccggaaatgctgcttcaatcatcttcgttacagttgcattacccccaaaggcaaccttagcgattggtgttgctgtccagcccggatagacaacactagcggttgcgccagtatatgcaatctctgtacggagacagcgtccgagcatttctactgccgcctttgaagccgcatatggagcgtttgccattccgttgacaaagcaataaacagaagaggttatgaggatttgtcctttgttgcgggtcacctctggtaaggcagcacggactgtgcgccagacaccaagtaaatcaacttcaataatcttatcgaactcagcttcatcacagctagcaattgtcgaagcaccatcacgccatgagatacctgcattggcgaaagctatatcaaggtgtccaaagtgttttattgttttctggactacatcttttgtggctaccgcatcagtaacgtctagcgctaatggtaaaacacgagatgcctcaaattcagatgcaagtttatctacagcttcctgttgcatatcggtgagtaccaagtttgcacctaatgcataaaattcacgggctgttgctgcaccaattcctccagcggctcctgtaattaaaacaacttttttgttcaggtcatatttcatggactttctccaaatgttttaaatttactgttacttgactggaacgatgcgtttaagaaagtcgatctgatcacgaacaacacgctcaaaagcttctccaacgtaaatttcaaaatgaccatcggcgtagtgcttaatttcatgattgggtgtatggctcgcatgacgcaatgttgtttttgagggggcaacagagtcggtatcacagacacaaaacaacacgggcgcttgaatacgtgatgtcttacgacccgggtaatagcgtatgatgtcgagtacaaaacgtgcagcgacatagtttggaatatttgaacctgaaggcatgagtgcgagataacctgaataagcatcaggtgcattcattaatgctgtatgtcctgatggtgctgcaagaggtaccatgactggcttggcgccgagtattgatccaatcttgtcttttaaagcgagtcccatgagcttgagggtcgttatcgggttcattgccatgctagatgagaaaccatcagtgaaggggcattgtgatataacagcagcaagccggttatcattggcagctgttgccagcacatggcctccaccgaaagaagtcccccatataactacgcggtttgggtcaattttgtctaggctacgtgcataggcaatggcagctttccagtcttcgagctgactttttatatctagtaattgtcgaggttgaccttcgctatccccaaaatagcgataatcaaacactaaacaagcataaccctctgccacgaaacgttcggcaaaagctgttaaacgcattcttcgagtaccacccagcccatgtgccatcacaatcattggagtagctacctcggttgtgggacggtataaataggcactgcatttcacgtcatttgaatcaaactgaacatcaagtggcgcttggggcacattatttagacttttacccatcgtatttttctcaatattggctataacactatcttctgaaaaataatgagattgggcttgatgaaagctgccatattgcttgacactttgcgccaaaatttggattgagcaggtatttttagttatttgcttttgcttgaaagctttaagtacactaattgataatgggcgccaaattagaactatacggaatgaatggattgaataagccgttgtatagaagaaggatttctgaaatctatgttcagttattatttgaatatctggaaaaactaggacatgacccagaaaaggtgctgggtgaaccgtggcctaaagcagattcaaatcatttagaaggcgtagatatcgaccattgggaaagtcttctcattattgctaaagattatttaaatgaccctttcattggtttacatgtggggcaaaccattacagctcagcatctgggtgtattagggtcagtatttcttgcttgtgaaaatctgggggcggttttagaaaggtttgaacgatatcagcggcttgtctatgatgtttatcctgccactgttcgtatttatactgaatatgtagagctttcatgggatacaaaaggtgagcaagtcggccctttatcggatgaaactggccgtaccgttatagttcaattttgccgtagtctcattagaggaaaagaaagacttaaagaaatacattttattcatgaacggcctgaaaatgttcagccttatgaggagtattttggttgtcctgtgctttttgaacagcctgtggcactgatgcgttttgataaggaaatcttaagtctaccgcttaaaaactccgacgcggccttagttgccatactagaaaaacatgctgacaagttactggcaagcctgccacatattgatgaaattacagatcaagttcgtaaacaaattgcttacttacttcatcaaggcgaaccaactattgaacagcttgcagagcgattaaattattcacgtagaaccttgcaacgtcgtttaaccgaggcaggtacgaattttcggaaagaattaaatactgtccgttacgaattagcaaaatcgtatttaaaagatctaaggctacaaattgtagaaatagctttactgttaggttatgccgaacacagcccatttacacgggcttataaagagtggtcgggtaaaacaccacaacaagctagagaagaaatgaatgagttaaggtagaacttatactataggttctaccttttaagtctatacaaatgctttaaaaaagatatgcagatgttttgagtgttcattcatcgtttaatgcacattcaaaattacttgggttttctttacatcttacttttttcaaaaagttcatcatttttgggtcgtagatacctgctttggttagctgtatacgagcctcgcgcatcattttcatatagtttaattgttcatttttaggaatatccatccaatattttgaaggaatatcactttcatatttggcaataataccaaatgttctattgagttggctggctacccaagttcgagacttttgcccaaaacccgcagggaattggtctttacgaataatgaagtttgctgaaatttgagtcagagggaaacgaacaattgctcctttctcacctaaacctttgtagagttcaaaaggtttaaacgccacaataggagcgggcacaatatcaatttcatggttattaaattttgcaccggcattggtaacgtctaccgatacagcctgaccaccgacatgttgaacaagctttggctgggcttcatcgtatttaaataccccaatttttttaccggcagctttagcgagagtatttatacttctatcatttacaaataaataggcaggaccaattgtgcctaaacctgcaatttcataaggacctaccaccatgttttttgcggccattggtgaggacaacagcttataggcattaattgccgttttcatatttgttaatgcaccaacagcatctaaagagcctgtatatttattaaactgacggccacgtaaaccgctaataatagcgccatcacattttccaactttcaaatcttcagcagctacacgttcatcaacatatgcttttaaagatagatcagctccccaatttttggcttcaagtgcataatctttggctaaagcgaaagcgtctcccgatttaccaatggggtcaaatacacagacgacttgttgtttggcataaagagttgtggttaaacatgtacttgtaataagtaaaatagctttaaaacgatccatatctagttatccattatttaaattataaaaattattttataaatcttggttaggttagatatggcatttcaataaaaattttaagtgaaaaagtcaaaagacagcttgggatcaggaagtcatttagttattcatagaaatttttatggtgaaaatacttttcgagccttgattgctatattgaatagtgcctttcagtgccacaataattgcatgtacaacagcaagacctaaacctgtgccgccaaattctttattccttgattcttctaatctaaagaaaggcttaaataaatcgtcttggaactcggttgcaatgccggggccttcatcctcaatttttaatatccagttttgtgataccacttccgaggaaattttaagtttgcctgcatgtgaatagcgtatagcattatcaattaaagcaattaaaacttgctcaatacgacggcggtcgcaatatacaggagtggaagttaggtcaagttctggtactagcttagcttgatccaaacgatcttcaaatgctttaagaactttttcaactaccgccttaaagtcaaacaattcataatttaaccggagttgctggttctctactaagcttaaagtccgtaagtcttcgactaagtgagataaaacttcaacttgatttaaaaggcttttaaataggacttcatcaggtttaaaaacaccgtcgatgatgccttgtaaacgaccttgtaatatcgttataggcgttcttaactcatgtgcgatggctgcattccaaacctgcgcatttttaacagaaacctctagcttttgagccatatcattaaaattatataaaagctccgacatttcggcggagtgaattctattatcgtaagctctagcagagaggtcgccgtgactaattttttttgctgcttcggctaagaagttaattggcacaataaaacgctttgcgaggcgcatgccaatcactaatgaaataatacagccgcaaaagataacagtggctaaccaaatccagtctacaaaatgaaaactggtccaatcttcttgttgaaatgagcttaaactaatccagcctttttcaatcgcatagttataaatgacataacccagtactacagaaaatagcgtaacgcttaaatttacaatagttaaggcaataaaaagttgcttactaattcctaacttacttttcataaaatattccctagctattttttaatattatttaggcgtcatcttttacagctaggggattatctagcctatatcccacgccacgcacattaattaacatttgaaatatgccttgttcttctagtttttttctcagcttacttacatggctatctacggttcgctctagtgcatcgctatcattcatgcagtgattcataagttctccgcgcgtaaaaactttatgaggttggtcaatcatgaatgaaataattttatattcagtcagcgtcagattaagcaagatcttcttattctcagagtgtatataaacgctatgagtgtcggtatcaatttcaatatttttatagagtttatttttattagttactttgtttgcaaactgagtacgtcttaagactgcctgaactctagcgatgacttcatttgggttaaaaggcttcaccacaaagtcatctgcacctatgcgtaatgccataactttatcaatatcttgatctagcgccgtcaacatgatcacgggagtctgagctttttggcgtattttatttaatacttcccaaccgtttaattcgggtaatttaatatcaagtaaaattaaatcgatgggttggctcgcatgcaattcaatcgcttgttttccattcatagcccgaataacactcatgccttcacgttttaaataattttcaataatgtcgccaatatcgtagtcatcttctaccacaagaataactttatcttggcaatcaaaagaaaaagaatgatcaaacatagaaaatctggctatagaaagtgcttcaactcatcatacgctaaattatccgtatttctccacacttactccacactttagtgattatccctacacactcatcaaaaataatacgaacatcaaaaactcactaggtttggacagtatgcaaaagcatcttttacttcctttatttttatctattgggctgatattacaggggtgtgattcaaaagaagtcgctcaagctgagccaccaccggctaaagtcagtgtattaagcattcaaccgcaatcggtaaattttagtgaaaatcttcctgcacgtgtacatgcattccgtacggcggaaatccgtccgcaagtcggaggtatcattgaaaaggttctatttaaacaaggtagtgaagttagagcagggcaagccttatataaaattaattccgagacttttgaggccgatgtaaatagcaatagagcttctctcaataaagctgaagctgaggtggcaagactcaaagttcagttagaacgttatgagcagttattaccaagtaatgcaattagtaagcaagaagtaagtaatgctcaagctcagtatcgtcaggctctagccgatgtcgctcaaatgaaagcattgctggccagacaaaacttgaatctgcaatatgcaacagttcgagcgcctatttctgggcgtattgggcaatcttttgtcactgaaggtgcattggtcggtcagggcgataccaatacgatggcaaccattcaacagattgataaagtctatgttgatgtaaagcaatcggttagtgagtatgaacgcctacaggctgcgctacaaagcggcgaattatcagcaaatagtgacaaaaccgttcgtattaccaatagccacggacagccctataacgtcacagcaaaaatgttgtttgaagatattaatgttgacccggaaacaggcgatgtcacattccgtattgaagttaataacactgaacgaaaattacttccgggcatgtatgtgcgtgtcaatattgatcgtgcttctattcctcaagcgctattggttccggcgcaagcgatccaacgtaatatcagtggcgagcctcaggtatatgtcattaacgcccaagggacagcggaaattcgtcctatcgaaattggacagcaatatgagcagttctatatcgctaacaaaggcttgaaagtcggtgacagagtcgttgttgaaggtattgaacgtattaagccaaatcaaaaattggcattggcagcatggaaagcaccagccgtcgcgaatcatgcttcaagtgtagaaaccaaaacttctatagctgaaggggcacaaccatgatgtcacaattttttattcgtcgtcccgtttttgcttgggttattgcgatcttcattattatatttggattgctgagcattcctaaactgccaattgcacgttttccaagtgtggccccgccacaggtgaatattagtgcgacttatcctggtgctacagctaaaaccattaacgatagcgttgtaaccttaattgagcgcgaattatcgggtgtaaaaaatctactctactatagtgcgacaacagatacctccggtacagcagagattacggctacgtttaaaccaggcacagatgtggaaatggctcaggttgacgttcaaaataaaatcaaggctgtagaagctcgcttaccgcaagttgtacgtcagcaaggtttacaggttgaggcttcatcgtccggatttttaatgctggtcgggattaactctccaaataatcaatattccgaagttgatttgagtgattatttggttcgaaatgttgtagaagagctaaaacgtgtcgaaggtgtagggaaggttcaatctttcggtgccgagaaagctatgcgtatttgggtcgacccgaataagcttgtttcttacggtttatcgattagtgatgtgaataatgccattcgtgaaaataatgtcgaaattgcacccggccgacttggtgatttaccagctgaaaaaggccagctcattactattccattgtctgctcaagggcaattgtctagtctcgagcaatttaaaaatattagcttaaaaagtaaaactaacggtagcgtaattaagttatctgatgttgccaatgtagaaataggctcacaggcatataactttgccattttggaaaatggtaagcctgctaccgcggcagcaattcaattaagcccgggtgctaacgccgtgaaaactgccgaagttgttcgagcaaaaattgaagagttgaagctaaatttaccggaaggcatggagtttagtattccttacgacaccgcgccgtttgtcaaaatttcaattgaaaaggtaattcatacattacttgaagccatggttctggttttcattgtgatgtatctatttttacataatgtccgctatacgcttattccagcgattgtggcgcctattgccttactcggtacttttaccgtgatgttgcttgccggcttttcaattaacgtactcaccatgttcggtatggtgcttgccatcgggattattgtcgacgatgccattgtcgtggttgaaaacgtcgaaaggattatggcgacagaaggattatcgcctaaagatgcaacctctaaagcaatgaaagagattaccagcccgattattggtattacgctggtattggcggcagtatttttacctatggcatttgcgagtggttctgtaggggtaatctataaacagtttaccttgaccatgtcggtatctattttattttcagcgctattggcacttattttaacaccggcactttgtgccacgattttaaaaccaatcgatgggcatcaccagaagaagggcttctttgcatggtttgaccgtagtttcgataaagtcactaaaaagtatgaattgatgctgcttaaaatcatcaaacatacagttccaatgatggtgatctttttagtaattaccggtattacctttaccggaatgaaatattggccaacagcatttatgccagaggaagatcaaggttggttcatgacttcgttccagctaccttcagatgcaaccgctgagcgtactcggaatgtagtcaatcaatttgaaaataatttgaaagacaatcccgatgtaaaaagtaataccaccattttgggatggggttttagtggcgcaggacaaaatgtagctgtggcttttacgacacttaaagacttcaaagagcggactagctctgcatctaagatgacaagcgacgttaattcttctatggcgaacagtacggaaggcgagactatggccgtattaccacccgctattgatgagttaggtactttttcaggtttcagtttacgtttacaagaccgcgctaacttaggtatgcctgctttactggctgctcaagatgaacttatggcaatggcagccaagaataaaaagttctatatggtttggaatgaagggttgccacaaggtgacaatatttctttaaaaattgaccgtgaaaagcttagtgcatttggtgttaagttttctgatgtttcagacatcatttctacatcaatgggttcaatgtatatcaatgacttccctaatcaaggacgtatgcaacaagtcattgtacaagttgaggctaaatcacgtatgcaattgaaagatatcttgaatctgaaagtcatgggttcaagcggtcaattagtctcgttatcagaagttgtaacgccacaatggaataaggcaccacaacaatataatcgttataacggacgaccatctttgagtattgctggtattcctaacttcgatacgtcatcgggtgaagcaatgcgtgaaatggaacaactgattgcgaaattaccgaaaggtattggctacgagtggacaggtatttccttacaggaaaagcagtctgaatcacaaatggcctttttacttggtttatccatgttagttgtcttccttgtcttggctgcactctatgaaagctgggcaattccactttctgtgatgctagttgtgccactcggtatttttggagcaatcattgccattatgtctagggggttaatgaatgatgtgttcttcaaaatcgggctaattaccattattggtctatcggcaaagaatgcgattttgattgttgaatttgcgaaaatgctgaaagaagaaggcatgagtttgattgaagccactgttgccgcagccaaacttcgcttacggccaattctgatgacatcacttgcatttacgtgtggtgtaattcctttggtgattgcctcaggtgcaagttcagaaactcaacatgctttaggcacaggggtttttggcggcatgatttcagccaccattctggctattttctttgttcccgtgttttttatcttcattttgggtgcagtagaaaagctattttcctctaagaaaaaaatctcatcttaagttcaatgcatcaggggaaataccaatttcctctgatgcttcatatgctcaaaatttactttatttggagaatactatgtctaaatcgacaatcgtatctcgtggactcattctttctacactctcaattgcactcgttgcatgtgtcaatatgcaagcgccacagcctgcaattacatctcatattcctcaaaattttagtcaaaatcattctggaaaaatgattgcagaaaaaagttataaagaatttatttctgatccgaaattattacaggtcattgaaatcagtttaaataacaaccgtgatttacggactgctacgcttaatattgaacgtgtacagcaagaataccaaatcacaaaaaatagccagctcccaaccattggtgtaacgggaaatgcagtgcggcaggttagcccatcgattaaccccaataacccagtttctacatttcaagttggcttgggaatgactgcctatgagctagatttttggggccgtgttcaaaatttaaaagatgctgcattaaataactatcttgcaactcaaagtgcaaaagaagctgtacaaattggtttaatcagtaatattacacaggtctggttaaattatgcttttgcacaagcaaatttaaaccttgccgagcaaaccttaaaagcacaagtcgatgcttataaccttaacaagaagcgctttgatgttggtattgatagtgaagtgccattaaaacaagcacaaatttcggtagagactgctcgaaatgatgttgcaacttataaaactcaaattcaacaggcaaaaaatttactggatttgttagcaggtcatcctgttccgcaaaatttacttccggatcatgctattcaaaatattacctttgagaaaaactttgcagccggtttaccaagtgatttattaaatcatcgtccagaccttaaagctgccgaatatgagttacgtgttgcaggagcaaatattggtgctgctaaagcacggatgttcccaaccataagcttgacaggctcgacgggttatgcatcatctgaactgaaagatttatttaaaacaggcaattttgcatggtcgattggacctaatatcgatctaccaatttttgattggggaacaagaaaaactaatattaaaattgcggaaactgaccagaaaattgctttagctaaatatgaaaaagccattcaatcagcttttcgtgaagttaatgatgcacttgctacacatgcacatattggtgaacgattagacgctcagcgtcgcttagtctctgcgactgctgcaacctataaactctcaatggcacgttacaaagctggagtggatagttattttacggttttagatgctcagcgttctgcttatgctgcacaacaaggcttacttgcacttgaacaaataaaattaaataaccaaattgaaatttataaagttttaggaggaggaatatcaaaagtctaataaagtttcactcttaaaaaaataagctgatagaggtattccaaatcagcttatttttgctttagatggtctaatattgctatgaaatcaggttatctaacacggggacgagctaaggcttgggttaaaaaattaatttggtcctctaaaatttttatttgccacggttcattataaaaatcaaaatgatcaatcggatattcaagtaatttaacttctccatttgctaagcttgccgacttgcgagcagcttcaggaggagtaacttgatcatttgaacccacttgtaccaataaaggacactttatttgatgggcgaaattaatgggccggtttcttgcaacctctaaagcagttcgtgcacatacttcattccgccatgttggcccagccatggctttataggaaacctccgagccaggtgtactaatgatggccgccgtgcccggttgccccacgattggaataagatgcgctttttggcctaaaagagaataagctaaatcttttagtccatgagcgactgcaacggttaattgttttagaccaccataacggcagatttgtgagagggcagctaaaccatccgtagccgggttcatagagattactgcagatattttctgatcttgggccgcagcgactaaaacatgccctccagaataagatgtcccccaaagcgctatacggtttcgatcaatatttggcaaacttcgtactgctgcgattgctgcatggtaatcttcacgctgatttttataggaaacattctgtcttggaaaaccaccagattctccaaaaccacgataatcaaatataaatgtatcaaaacccgctttactcaatggttctgcgaaatttaataaaccggtatctttggtccctccgaagccatttgccatgactacacagggccgcccacgagagttcatatacttatctgttgtggcaggaatataccatgccgagcatgtaatccctttactgataaatttaatattttccataatattgtgctcatgtatttagtcccttatttaggctccagatccgataaataagagactaaaatgctgattaaaggagattaagctttgaccatcaattcttctgaagatgtttccgtaacgacagttaactttttcttgggaaccaatgcagtgaactttaattccttatcacacacaggacctttattgagccgctcaaagtcaaccttataatcatgttgtagtgtccaaggaccttcggttcctgccattgggaattgtgccaaaccacgttgaacataacctgggctcaaatcaacaaaaggaacccgtttcatggttttattatgaataatcggtgtaaatgttccgtatttattctcatccatatagtcaaggagacgacagaaatgttgccataccagatctacttttaaggtccatgcaatattggtataaccaaatgcaaaggcaaaattaggtatatctgacagcatcatagatttaaatatcgtcgtgtctggataattaattttcttaccgtcaacggtgagttgaatcttactaaatgccagcatatttaagccggttgcggtaataataatatctgcttctagtacttttcctgacttcagcaatatgccttctttgataaaacggtcaatatgatcagtcactactgatgctttaccagatgaaatcgctttaaacatatctccatctggtaccacacacaaacgctcatcccaaggattatatttgggtgagaaatgcgttgatacatcaaaatctttaggtaatctgcgccgtacatctgcaatgagtagatgacgcattacctttggaaagcggtggcatagtttgtaaatcccgcggctaatagcaatatttttacgtcgtataatttcatacgctcgttgcggtgataaaactgtatttaaagcaactgcaataggatcgacactcggcatagcaactacatagccaggtgatctttgaagcatagtaatatgctcaacgtcttttgccatagctggaattaatgtcactgctgtagcaccactaccaatgacgactacttttttacctgaatagtttagattttccggccaatgttgtgggtggacaatttgtcctttgaattcttctgtgcccttaaagtcaggggtatatccattgttatagtcataataacctgtacccatgagtaagaagcgagaacgtaaggtaactaaacttttttgatctttctgtttgactttaacggtccagattccttcattcgatgagaattctgcactggttacatagctgccaaattgaatatattggtcaataccattttctgtaacagtttcatgcaaataatcacagatcatttgtgcgctaccgaaagtctttttttgcgtccatggtttaaaaccaaaggcaaaagactgcatatctgaatctgagcgaatccctggatagcgaaatagactccaagtcccgccaatatcatcacgaccttcaagaataataaaggttgaattaggtctatatttctttaaatggtaggctgcgctgataccagcaatcccagcgccaataataagaacttctgcatccaaagattgagtaaaatccgtttttctattcatgatattcaccctgctaatttttgagctaatgcatgtgtgatgcttgcagcagtttcaataccagactctagagcaccttcgataccgcccatgctcattgttgcaatatctcctcctgcgaaatagatattcccatgaggtttacgcatgagcggagctgcatcggacaaatgcccagggcgatagtgtacccatgtgccttgtgcataagggtctttagcccagttatgtgatgcgatatcaagcacttcaatgtcaggcttaaacatctgtaaagctttttgaacagcttcaatatcgttcacatctatagttgactcgtcagaaataaaacagactaaaattgagtcatcttcatgttcatattcaactcgaacggtattgattgggttttgctcaactggcgcaaatccaataaatggctcgatttttccacgtacacgtgcccataatttagcagtacgcattggatgttttgcaacaatcatatctcgagcaggtttattaacctctggtgtaattttgatgtcagataaaacatttaatggaacagcaacgagggctttttttgtcacaatcttttcaccagattgagtcgtaataacaacctgctcaccttgatcatcaatggctgcaactgaagttgtaagtcgtaattcagcacctgaatcattataaatagctcttacgagtttttgtgttccaccggcaattggccaagaccctgctacttcaaagaacgcaccccaatttccaaaataggtagctgcccagaataagagctgtgcgactccttgctcatcccaagagtgaacaagtgttgataataggccgtctaaaacgtcacgttcataagttgataaatttaaggtatcaagacgatctcttaatgtttgtttttcaatatcactcgtatcgatagcatttacatcataaggaagaggaaaccactgacgagcgtcattaaagaaagctgttaataatggttcagcaatagcagcatattcagcttgagttcccgtgtgtagtttcccgtctgcaaaccaaaccgttttatcaacttctgtaggaggatttaagccaattccgtagcgttgtagttctctccaaatataaggttgagtccagtgtgagtaaccaccaccaaattcaacttgtcggccaaatgcttcacctgtataggttcggccaccaatacggtcacgtgcctctaataaaacaaccttatgacctgcattacttaaatcccgtgctgcaacaacacctgcacatccagcgccaattactgctatatcataatcatactttttcatagcacactctccacaatctcagcacgaggtgttcctacacgttcaagggcagtgtagaaagcttctggttcagcccagtcttctggggcgaaagttccgctacgtttacctgtttcatcgagcgctaataccatgaatgcagcacaagccgtccctgtaatagcggccatatcgcgcattaaataggaatcttcacctgatttaacagttcttctgattgcaactgctggtctaccatttttagttccgtagactcgagctaataaaccgcctttatatggataggtttttcctatagcagattttgtcaaaaactcgaccatggcagagaatgaggattctttacgtttaacttggccgatcatgccactgattgcagctttccagcctttagctgaacctaatttgttattaagtagatcttcaaggaagtccacaccttcttttactgtcatttcaccatgatgaacagctaagccaactccacgccctagtccattaaatggggcagggtgtaaaccacctaaacaacggatacgttgagcagttggatatttgcgtggcaaagtaactggttctggatgagctgtttcatacattaatatttcacccaatccacctcccatcggtgcagtgcctgtttcgacaaaagtttcgtgattaacacgtttgccattttcccaagtaagacagtcacccgccgtgatatgtaagaaatgttcaagtacggcacgaccaatacctgggcgttcgtcaccaaccatccagcaacaatcaatattttcaacggtatctagctcatttgcggcatctaccactaacacatttgccatacctggtgaggcaccacaacctacatagattggaatacctgcttcttttgctttttcatgcaaagataacgcatgttcagtactttcaacgtcatcatcaaaatctaagtaaggaacttttgcttctaaacatgcttcaatgacaggcgctgaagttcgaatgtatggacctgctccaagtacaactaaatcagcaccattaaccacagcttgtagcttttgcttgtcatacaaatctaaatgttgtgtagttgctagcccttgagggagtttttcaacaagatttgaaagtaattcaggacgaatatcacatagtacaagttcccaatcacctttggctttagcaaaacgctcgatcgctaaacgacacatttcacctgctgcgccaataaatataatacggcgactcatataaattctccttagaatcagcaacccatgccgattacgatttttatttatttccatagttccaaagttccctggaacgaatgtttatgacgtctcactttgctgagatgacttagtgaaaggaaacgccgttaattatttttaatccaataattacactatgtcaatgacgcattgtaattattgaaatttaattaaattcagtaggttatacttgtttcaatttttgaatcatagaattaaaaattatttttatctaataaaatcaattgattgaatagaaaataataaatttaaggaatactttaaaaatttagttatttaaaaaagttttattagaatccagtttggtttttcacttacccgcttgttcagggaagaaggattgttctacacttacatagtgtcaataaattaaaaagtaactcgtaattatgactgtgaatcgccgacgtcctaaacatgacccgaaagaatctgaaagggaaattttaaatgctgcagaaaaatttttaagtgaacgaccatttcgtgaactaaatgtagatgaagtgatgaagcttactggacttaagcgtccagctttttatgtacattttcgtgataaatatgacttagctttacgtgttgttcaagacattggtcaggaactatttacattagccaatcattggttaaagggaaataattttccggaagattctcttcaggcattacaaggaatagtcaatgtttatcagaagcatggtgctgttttacgagctttatcagatgcagcaggagcggatgagcgggttgagcaaatttatcgttctttaatacaagattttattacagctacagcacgccatatatgtgaagaacaggaaaatgggcgtattagcctagaactgaatgtagatgaaactgctcgtgcattagtatggttagaagaacgctatttatcagaagcatttggccgtacacctcaagctgatcctatagttgttgtgcaggtcttgcataatatttggatttctacactttatcgtactaattaaaaatattagctataacttgatgaatgctcaaaaggaattgctcattcatttttttaattaaaatatatatttaatatttaaaataatttttaaaaatatttttcatcctttctcaatctcttaaatacaaattaaattttaatctaaaattacacagtgtcattgacatggtgtaattgttaaagcaatatatattcagctctacgatttcgtacgcattgctataaaacactcaacattttttcagggaagaaattatgtactgagtatgcgatagcctttttttgaaaaaaatgaataggcgaaagtgtgggtacgtgggctgagcaatatcaaatatcaaaggaaggaacattagatgaataatattccacatgcaaataagtcattctggctagcccactcaggcgaatatattccatcaccacctcttagaggtagcattgatgtagatgtggtgattattggaggagggtttactggattatctactgcttatcacataagaaaagtggattctgctgcatcagtggctgttcttgaaggcgaatgtgtagcatttggtgcttcaggccgtacctctggctgggttgtgccagttccagtacttgatcccactactgcaaaagtactttatggaaaagaaagattaactgaacttcaaaatttcgcatggaatggtctggactatgtgcaggacttaatcaaacgcgaaaatatggatagcgattttgaaatgcctggtgtgacatttactacacttcgcggccatgaaaaaagattagagcactttactaaatattggcaagatcaacctcgctctaaagacagcgtctatatggatagagctacggtaagccaagccctaaatagtgatgcattttctggtggatgccgaatgccacattctgggcaagtcaatcctgtaaagcattctcgagaactaaagcgaattgcagaacaggctggtgcacaaatttttgagcaaacgccagtattggatatagaagataaggaaacgttctttattctcaaaactccagaaggagaggttagagctaaacatattgtattaggtaccaatggttttactcatttattgccaccagaattggggctaaaacgcgcccaactccccatgtttgtatatcagttaattaccgaacctttaactgatgaagattggaaagcgcttggatggaaacatcgtggtcagttttatgacaaaacaacctattgtcctccaacctgtagaacgactgtagatggaagattgcaatttaacctatgtgatatctatgtaggagaagggcgttctatggacgaagctcagaaagtgcaattttatgatgccgctgagcgaatgtataaaaaggtatttcctgcatttcagaaattaaaaattgctcaacgttggagtggcgcttgttctattccttttgacgtaaggtctcaagtgggcacactccataatggtcgtatttcttatgcctatggatacagtggtgcaggcgtcatgatgtcacaaaattatggccgaattttagctgatcttgcattgcaacgtaaaacggagcttaccgagcattggtttgttgccaatggagaaaaaggacacgctaaatttaaacgtttcccactaattccgggtctcatcgctgcgctacgtacttatttcgaatacgaacgagtatcagcactttctaggagaagacgccttggactcgattaaacaatatgatgatgggcacgtatttacagcgtgggttgcattaatcggcacagtaatggctgcgacatgcctgctttgttttcttgcagttactggctttgatttgcaccaaatatttaaacctgaatttgcattaactttgtcggcaaaagaccaagcacttttcagaacctcaatgatttctgattgttttgggttttatcttccttttctggctgtaggtgtatatctgtggagaaagctacgtccttcaggtggattattgtcggatatagctattttattcctcgtgatttcaacaatgttaggtataacaggggctgctttacaagcctccgtgttaggaccacttgctgaaacatatatgtctggaaatgaaatagctaagcaggcggcgggcactgtttgggccaccatttcgcaaggctctcaaaatggtttatggccaatggaaggaccgacaataggtttttgggcaatagtcaacggactacttttgagaaaaaacaaatccgtattaggtttcccactggttctggttggcttgggatatgttggatttgctgtgcttcttttctcaggcttttctcaagcggctttattccttgaactgttcttattaccagtgcaagtagtttggttaggtattttcggtttgagtttattacaaagatagatgtaaagaattttagagccatatgatgaaatatggctctaaaaataaaaaactatcctaaggatttagggaaataacaaccaaaaaggatatagatatgaatgagataacaactaaaaaggcaaatccgattttattaggcgtacttggtgtattcgttagcaatatcagtcacgcttcagcacttgaacaatcgggccaatctatcttgccatttcttgaaaatgggaattatgcagaagcaaatttatttgcagttgattcatctgtttctggtgtagtcaatgatagagccgatcttgtaagagatcatcaaagtcgagatacaggtgatattgcagaaagtacgcaattttatacagctgcaataaagttaaaactcacagatcgtttaggttttggtgtgctatatgatcaacctttttcagcagacatcaaatatccggcacgttctaataatagttactttgataatgatattagctatgaaggtacatcagtaaaagccgatactcaaaatttaagtttattattcggatattctccatatcagctttttcaaatttatggtggacctgtttatcaaactgtaaaagcaaatgtagcgcttagaggtaatgcctatactcaggcttttaatggctataatgctaagtttaaacaacaaggtgaggttggttggttgttgggagggagctatcaactacctgatatagcattaaaagcagcaattacatatcggtctaaaatcaaatataaatttcaagtggaagaagatatttttggtgaaccattaaaacttgttgaaaatgagaaaaccaaattagagactccagcatcattaaatattgattttcaaacaggtatttccgaaaaatcacttgtttatatgaatttaagatgggttaactggaaagaatttgagactcggccaccgcaatatggcgctctatctgaaattattatgaaagaggtaactggtggagcttatacccaaggttttaagctcgattcttatcagaatgatcaatatagtgcgactgtcggtctcgcacatcaatttaaagaaaaatggggtgcttcaacagatgtaagttgggactctggtactggtgatcctgcatcaacaatgggaccaatcaaaggatcatagtcgcttggtttaggcgtccagtttaatccagctaaaaactactttataactggtagcttaaaatatttttggctaggtgatactaaaactgaagatgggacttattacttaccaatagagggaatcaagccatacgcagaacaggcaaatttcaaaaataaccatgcaattgcttatggtttgaaatttggatattggttttaagaagggtcgataaagccttatacaatggcagtaaacagcattgtgtaaggcacagatacttgttaaatatgcttagaacacttagccaaactatggtcacagtgaagatcaagtgacttactaatatatggagagtagcaaagccttatatatggtaggtttgcaaatcttttatttaacataatatacattatacgaacaattatatagtttaaactaatccctagttatttctatctttcagatctaaagctctctttatgtaggtttaagttatttggctgaacatcactatattattaccttaagtttttaagtaaaattaaataaatacgagaattatttacaacctattcaaaagtgattttatttttcatattttaattcgtataaataaaaaatctgagctaaaacattatttttaatttccgtgaatatatattatttcaataaatattataattaattaaattattttttagcttggtattttaggttaaatttttataattttaattaaagcatttattatcaataatttaattttacaataactaagatacattaatatttgtaaagtgtgatttaattatcgttttaataaaatagatgtagaaataaaacctatttaaacaaattaaataattagtgagatacgggtcacatattattttatgttttttaattgaaattgatttatatattgtttttaaataaaaaatattgtatcacttatattaactatttaataaataggtacttataaaatgaaaaataatatatttaaaattttggttttggcggtattttctacttccccactattttgttatgcaaataacacaataatgatcaaaggaaatattgttgaagacacatgctcaacaaaaagtaatgagatagaatgtaacgcagtcaataatttgaatattaaacttgatagtgaatatttaaataaagatagtctctataaattagctcaacatacagagaagatggacactagcattgaaagtctaggttctaatcgaaagattatacttatcaattatcattaagctcatttcatcacatttgatcttattactatagaagctgcaaaagagtgattgatacaattcaacataattttttatgaattgggtattgggtcactctttttctgcaaaaatgtctatttgtatattttttctatatacatctgcataatttattctatataattgtattgtaagaatttaaacttcttcttcacgtaaattgtttaattcttttccagttacatagtagccttatgtaattttcttatctctacgattcctttcttctaaacaataaaaactatttataaaacagctacataagctgtgttaactagctattaactgcaccccaaaagtgtgacacaattaaaattataaaaaaataatgtgacatagtttgcattttgtttaaaaagtgttagcattgttacattacttttcaagatgtcaaacactggaaaagtaaggaattaaacttttatccagacttttgagaaaacactatgaaaaaacttgctttgatcgctgctctttcggttgtagggattgcgaatgctcaagctgctgatggtacaattacaattaatggtttagttacagacaaaacttgtgacatcgttactcctgctggtaaagatttcacagtgactcttcctactgtttctaaacaaactttagctgttgctggggatgttgctggccgtactcctttccaaatcaacttagctaactgttcacaaggtaaagtagctacttactttgaaccaggtgcaactgttgacttcaatactggtcgtttacttaaccaagacgctactggtgctaaaaacgttaacgttcaacttttaggtagcaacaataacttcatcccagtacttgctgctggtgcaaacggtgctcaagctaactctcaatgggttgacgtagctgaaggtgcaagtgctgaccttaactactatgctgaatactatgcaactggtgcttctactgctggtaaagtaactacttctgttcaatacacaattatctatcaataattaattgatagcggggtttctatgtccgcatgggaaccctgttttgtgtagcactttcctgaatctttcttggttgagaactcgaaaaatgaaattgaacagttataattttttgctctgtacacgacaaatttcacagaacccttatcctatcagggttctgccttcttaaaattgccaaaatttccttaaactcttcttttttcccaaaaccaattaaacgctgaatcgccatttgaacatagtctaaaccatagcgaaataaactcattgagagtcgtccatgcttctttatttttatcgcttttttttgatcatgttgccattcacccgttaagtaacaccaacagaagcttatagctaacaccgcaatcaattttttcactcgtctagggtctgtcaagcgcgtattttcaagattaaacccgcgtcctttgagacaactgaataaggtttcaatttcccagcgtaatgcataatcctgaatagcattggcattaaactgaggagaaacgacgagtaaaagctctccattttctaactgtagtgcacttatatatagtttcacccgaccaaccaaaatccgtcgtttacgacattcaatttgaccaactttaagatggcgaaataaatcactaattttatgattctttcctaaatgattggtgacaatgaagtttttttaacacgaatgcagaagttgatgtcttgttcaattaaccatgtaaaccactgctcaccgataaactctctgtctgcgaacacattcacaatacggtctttaccaaaaatggctataaagcgttgaatcaaagcaatacgctctttcgtatctgaatttccacgtttattaagcaatgtccaaaggataggtatcgctattccacgataaacgattgcgagcatcaggatattaatatttcgttttccccatttccaattggttctatctaaagtcagttgcacttggtcgaatgaaaacatattgaaaatcaactgagaaatttgacgataatcaaaatactgacctgcaaagaagcgctgcatacgtcgataaaatgattgtggtaagcacttgatgggcaaggctttagatgcagaagaaagattacatgtttgctttaaaataatcacaagcatgatgagcgcaaagcactttaaatgtgacttgttccattttagatatttgtttaagataagatataactcattgagatgtgtcatagtattcgtcgttagaaaacaattattatgacattatttcaatgagttatctatttttatcggtacagagaattttttgttaggtttggcgtttgcttcatctgttgctgctcctgccgctcaagcagaaattgtaattcatggcacccgtgtaatttatccgtcggatgctagagaagttacgctacaagttagcaataacggttcaaagccagcacttgtccaagcttggattgatgaaggtgatccaaaaagtactccggatcaatcaaaagttccttttatgattgctcctccaatttctcgtgttgaagcgacaaaaagtcagacgctccgtattactgcccttccaaatgcttctcaatttaaccagaagcaagaaactgttttgtggttaaacgttttggatattccaccaagacctacctcaaaaaatgcagatacgacacctgataacttcttacaacttgcaattcgttcccggatcaaattcttctatcgtccggcttcaattaaagaagatgcgaatttagcagcagataagcttcaatgggttaaatctggtcagaatttaacggtaaaaaatccaactcctttccacattacgatgacttctgtttatcaaaaggttggagataaaaaagttgatttattgcctcaagggctaatggttaagcctttttctgaagcttctattcagcttaagaatagcaatcttcaggatatgagttttattaatgtcaacgactatggtggtcgagtcgaacaccaaataaaacttcagtaatcagattatctttttaataaatttaagcacctattatgtgagtaggcggacttagctatgccaaaaaaaaggcaagaatcttataaattattaaaacgccatatttgttattacttggcttctggcgttgttacaatgacaatgcctgtgttcgtgcatgctgaagaagcagctgcgagtgcgcctgtagaagctgaatttgattctgcttttttaattggtgacgctcagaaagtcgatatttctcgatttaagtacggcaaccctgttttaccaggtgaatataacgttgacgtttatgtaaatggtcaatggtttggtaaacgccgcatgattttcaaggcattagatccaaatcaaaatgccgtaacttgttttactggaatgaaccttcttgaatacggcgtaaaacaagaaattttaaccaagcacgctccccttcaaaaagaaaataatagttgttataaaattgaagaatgggtagaaaacgcattttatgaattcgatacgtctcgtttacgtgtagatatttcaattcctcaagtcgcattacaaaaaaatgctcaaggctatgtcgacccaagcgtatgggatcgcgggattaatgccggctttttgtcttatagtggtagtgcgtataaaacttttaatcagtctggtgaccgaagcgaaacgaccaatgcttttatgggggttacggctggactaaatttagcaggttggcaattacgtcataatggtcagtggcaatggcaagatacgcctgcggaaaatcaatctaaatcagactatcaagaaacaagtacatacttacaaagagctttccctaaatatcgtggtgttttaacacttggggatagttttacaaacggcgaagtatttgactcatatggttatcgtggtatcgatttttcaagtgatgatcgaatgctaccgaatagtatgcttggttatgctccacgtatccgtggtaatgcaaaaaccaatgcaaaagttgaagtacgtcaacagggccaattgatttaccaaacaactgttgcaccaggtaacttcgaaattaatgacctttaccctaccggctttggtggtgaaattgaagtttctgttatcgaagcgaatggtgaaatacagaaattttctgtgccttatgcctctgttgtacagatgttacgtccaggcatgaaccgttactcattaactgtaggtcagttccgtgatcaagacattgatctggacccttggattattcagggtaaataccaacaaggtattaataactatttaaccggctataccggaattcaagcatctgagaattacgctgcaatattgcttggtgctgccgttgctacaccaattggagcaattgcattcgacgtgactcactctgaagctgagtttgaaaaacaggcttcacaatcaggtcaaagtttccgtttaagttatagtaagttaattacgccgaccaacacaaacttaacacttgcagcttaccgttattcaaccgaaaacttctataaattgcgcgatgccctgcttatacgtgacttggaagaaaaaggtgtaaacacttatgctgctggtcgtcaacgtagtgagttccagattactttaaaccaagggttacctgagggttggggtaacttctatgtggtaggttcatgggtagattactggaatcgtagcgagagtactaagcagtatcagattggttatagtaataactaccatggtttaacttatggtttatctgcaattaaccgtaaggttgagtacggctcaaatgatgcgtcgcatgatactgaatatttaatgacgctttcattcccaattaactttaagaagaattcagtcaacgtcaacgttactgcttctgaagacagccgtactgttggtgcaagtggaatggtgggtgatcgctttagttacggcgcttctgtgtcacatcaagactatgcgaacccaacatttaacgcaaatggtcgttaccgtactaactatgcaactgttggcggctcttatagtattgctgattcttaccagcaagcaatggtaagtttaagcggtagtgttgttgctcactcagatggtattttatttggacctgagcaaggccaaaccatggtacttgtgcatgcacctgatgccgctggagcaaaagtgaataacacggttggtctaagtgtaaataaagcgggttatgcagtagttccttatgttacgccataccgccttaatgacattactcttgacccacaagaaatgtcgagcgaagttgaacttgaagaaacaagtcaacgtattgccccatttgctggtgcaattgcgaaagtagattttgcaactaaaacaggctatgcagtttatattaatagtaaaactgcagatggcaacagtttaccatttgcagcgcaagtctttaaccagaaagatgaggctgtaggtattgttgcacaaggtagtatgatttacttacgtactccactcgctcaagatcgtctctatgtgaaatggggcgatgaaagtaatgaacgttgttcggttgagtacaacatcagtaatgagttgaaaaataaacaacaaagcatagttatgactgaggctgtctgcaaatgaaaagaatattattaacaggtttcttatttacggctggccttggtgtatacggtgaagctaatgcttattgtacacttagttctggattcaccacagttgatatatcaatggctgtgggacgtgttgttgttcgaccaagtgacccagttggaaaaatattaagaaaagcaacttttccaattaatccaaatggatccacactccgttgtacttcatatagcgatactattacggctgcattaactcaaaactatcctttaagccctctaggcaacagcatttattctacaaatattccaggaatcggtatccgtttataccgtgaagcagaaaatgcaactaatttttctggctattatccgtatacccgtagcttaacccccggaacaacttacaatcttgctcagggatattttgttgttgaaattgtgaaaactgcagatcagactggttctggcacattggttcctggcttatatagccgttactatgtaaatggtcatatggatcgcccttttttaaccagtacagtttatggtaatgcaattaccattgcttcttcttcatgtgaaattcagggtaatatcaataaagttgtacagctaccaacagttacaaaggcaggttttaaaggtgttggctcaactcaaggcgaccaaacctttgatatgaacattctatgtaatggtggtattaatccaacaggttatgaagagaaaaacctcattagcttaacttacgactttacccaagacggaacaaataatcaggtcctagcaaatactgctccgacatctgaaaaagcaaatggtgtaggtgtacagttactctggaattatcaaaataaaaatcaggttatcaaaaaaggtgacaaattagccttaggtaccttgtcttctaaccagacaattcaatataacgtaccaatgactgcccgctactatcaaacagcaacaaatgtgacggctggtaaagtacgtgcaatggctactgtaactattgaatatgattaatcatattcaatagtttttaaacctaataatttcaaatatttaaatattaataataaattttaatttaacactactttctaagaaatttgatacttaacttaataggaaaatttatgaaaaaaataggtatagttactgttggtgcagtgacattatgttgggctatgtatgaggtatcttctgataataccaatacagtaacgcataatgaggctagccaaaaagtcacatttaaaaacttttcatcaactgcaaagaatgaaaaattagcgcctcaaatacttttggctcaaacgaactctcttaattctgccccagtttgccaatacaattttgacgcgactcaagaagattatgatctatttaatacccaatatcctgatcgaccacctacaatgagatttcctctaattaatgggcaaaaatttggctttaaagtagagcctgtcactgaagacaagtatggttatttagtttatacagcaaaaagtaaagtaaaaatgaattcaaccagttatgagggggatttcttattacccaataaaggcattattgcttttgaaatgcaacttaaagtacccacactttcttcaagcacttcttcttattcagccgagattagttttaatggtataactgataataactatacaattagatcaaattatcattttgatattggtgttcatgattttgaatttggtgaaaatcctccccgtttatatcatagcgtatcatctgagatgggagattatcagttttttgataattactttaaagacaaaaaaatgacggataacacaaatgaatatcaacgcctaggtgtttatattaatcaggatacgaaccaagtcggatttatttctaatggtgttgatgaaggatatcaatttaaactaccgggtgcactacagaaaatagcttttacagttgagggaattgcatatattgaatctacaaatttatttggatatgaattttctaatgaactgattacagaccgtaatgcgctaaagtttaactatcctcagggcacaacagatatgtgtggtaatgctatttaagatataaaactataagtcataaaaagggctgaatcacagcccttttttatttcatttagaaatgaatgacagtacgaattgatttaccttcatgcattaaatcaaaagcggtattaatgtcttgtagaggcatagtatgagtcacaaaaggttcaagttgaatatcgcctttcatggcatcttcgaccattttaggaagttgtgaacggccttttactccaccaaaagcagtgcctaaccatttacggcctgtaactaactggaatggacgagtcgaaatttcttgccctgcaccagcaacgccaataataacggattgtccccaaccacgatgtgcacactctagagccgagcgcataacattgacgttaccgatacattcaaatgaatgatctacgccccaacctgtcatttctacaatcacttgctgaataggttgatcataatcttttggatttaagaaatctgtagcaccaaactgcttagcaagttcaaatttatctggattagtatctacgacaataatgcgccctgctttcgcttgacgtgcaccttgtacaacagctaaaccaataccgcctaaaccaaatacagcaaccgaatcaccttcttgtactttagctgtgttatgcacggcgccaataccggtcgttacaccacatccaagtaaacaaacttgttcgtgattcgcttcaggattgattttagctaaagagacttccgcaactactgtatattcactaaaggttgaacaacccatgtaatggtaaatcggttcgccgttatatgaaaaacgtgtagttccatccggcattacacctttaccttgcgtcgcacgtaccgcaacacacaagttagtttttccggatttacagaataagcattctttacattcagctgtataaagtggaatcacgtggtcgccaggttgaacacttgttacgccctcgcctacttcaactacaacacctgcaccttcatgacctaaaatcgctgggaaaacaccttctgggtcatcgccagataatgtaaaagcatcggtatggcatacccctgtatgggtaatttttattaaaacctcaccagccttgggtggtgcaacatcaacttcaacaatttctaaaggttttcctggggcaaaggcgacagctgcacgagatttcatctttgggtttcctttatatcattcggtacttatagtcgagcaaaatagattatgtaaccgtaatacaagagcttaattttgcttaaattaaaattggctttcatgacaatccatcacagcatagccagtcagaaacgtctaagcaagcctgtactaaaaaaagaagaaaacctcctaagtgaagaggttttctatcagattacttctcttataaacagcttatgtttacttaaaggtaaatatctggtggatacggtgtgttatcactaattggtgagtaaagtgtattttcaacaaagaagccatttggggcttgggtcgtatcaattgtaattgaatcgaacatgacttgcggataggcccagataaactgcttcatgaggccaagagatacgttatttttcatatcgccaaaaatcctctgccaaattggcgtccgataaggtttgtttttgtcgaatccatagatataagcaatagatgcatctggtacaaatccagataaataagcaactttatttgccggataacctaaatcttgagttggtatctgagaaacagcttgatgagctaaatctaatttagcttctaaaagccagtcataagcttcagtcatgatgtaatcaaaatttggatatgagtagtgctggcttggatagttgatataggttgctagggtttgtattggagaacgaatggatgggaaaaatattaaaggacacacttgagcatttgcatatttagctttaatggctgctcgaatattttgacaggtctgtcctaacttatttcttaaccaagttttaaactcatcatacggcgtacctgttttattcatagcctcatagattgtgcctaggtctggcgcatatagtcctgtatcggcattaaaggctaattttgttggatagtcatacacacaaggtaggttcgtgtccgtgttataccaccaccaaggttcaccaatttgcatgttaacattacagccgccagcaaccattgtatctgcgaactcaataaaaactttgtgcaaataagccaaagcattttgatcacttaagctaaagaaataactcggtggttggtaacctgttttacctaaattgctattccagtcacgctgtgcccaaaactcatttgctgcaagtgaatacatctcaaaacttaccccaaaaatgggttgcatgtttgcattatgtagagcttgggcatatttctcatgccattttcgggcacatgggttgacgactgcctcacctgttaccaacgtatctggtatttgccatttattaatatcgcttttccatgtcatttcgggataatgcgacattccacaatagtggtttaccaacccctgatatcccaaagcgaccatattgttgactaggcgctgcgggttcaagtcataatggtcatcatagctggtacagatcccataattgtgctgaggtacaacaacacgactcagatttagctttgcatttgttccagtcacgactgaattggtaatacgaatataaccatcttccggctggcttaacggcgtagctgactgaccgttataatggctagtaaagcctgaaaatgagatacgttgaatattggttaccggaaagctatctgtagcagaaaaaccagctttaactgtatcccagttaatatgaatgtgcgccgttcgcgacgaaggattatttgcataattaaataagacgatatatgcaattttatctacgccattgtcatgatagtacaccgttaaagttggcgttaaacttggattattaagtacgggcatagaagccgataattcaatatcaaaatcccaaactacccctgcataactatatttggtttcatatgctaaaagtttatgatctttcgtatcataagaatcccagctaatccctaccaagtcatttgtcatacgtgatctaaaagatgcttcaaatccatttccataatttgtaatggcaaaagacgtggtttgtgggccgtctattctccagtaaataggactaaaccgatcaataagtgtattttgggtaattggatgaggtgatgtattagtattattttgcacattttgtcgattagttatcatgacgtcattctcttaatgtattaagaagttttatattaaataagtattcttattttactgttcagataagtaacaatgacgtttaaattatttacagtgaataattttaaaaagctcaaaataaacttaaacaaaaaacttaatattattctaaaatattttttctaccgaggagactataaatgtcaaaattaatacagcctatcagttttaaggctttgtttatatttactcctcttctgtttgtatcaataggttgtagtgaagcgctatattcccaaacaatcccatcagtaaagtcttcttcagaaaatatcgactatccagagatcgatacagcattaggagaaaagttacaaccgaatgaggaagtaatagctcatcaaataactcaagttattgagaagtctattcgtgaacagtatacagcgggaaatgctttgcgtgatgcacaccctaaagcgcatggatgtgttcgtgctgaatttcatgtacttaaaaatataccagctcaacttgcaaaaggtatttttattccagataaaaactatgaagcatggattcgtttttcgaatgcttctaatgatgcttctagagcagatattgaaaaagacgcacgtggaatggcaataaaaatcttagatgtatcaggtcagaaaattttagaaaatgaaaaagaagctacaactcaagactttattatgattaatcaccccgtcttttttgtaaatgacgggcaaagatacctgtcttttatgaatgatctaaatagccataatatgatcagaaagcttcatatgccgtttgctttaggttttaaaggtaccatgaatgctttaggtgcgcgtaattctaaaattgcaaatccactatatgcgcggtattggtctatggtgccctatcaattaggattaggtgttgaccgtcaagcggttaaatactccgtaagaaattgctctacagtgactgcagctctacctgatcatcctagccataattttttacgagatgccttaaaagatacattgcaaaagcaagacgtgtgtatggaatttcttatacagccaagaacttcgactaaaatgctggttgaagatgcaatgaccgagtggaaagaaaatgaagcacctttttatcaagttgcgaccattcatattccaaagcaaagctttgatacacctgaacagaatcaattttgtgaaaatctctcttttacaccgtggcatgctttacctgagcataaaccgcttggcgcaataaatagaatgcgtaaaattatttatgaaaatataagcagagttagacacgatatcaactcagctccccgacaagaacccaaaaactaatttaagtataaaagaactgccaataaccaaagcagttctttatagttcagtatttgatgaggatggccatagattttctaatgtctatacatcaatttctcagcaatagagcttaggttggctaaattcttttttattggataatctcctttactcgtatctatggtgatccgatcaatgaagtctgctaaccataaaataaattcttcttcatttttatagctaggaatcaaactgctatcaaatttgagcaatacttcatcttgaaggttaagcagcgaaccaccgaaatctaaaaaattatataaaaattttaattcagttcctgtaatggctttttttatttctataattaaattatttaagttttctagataattgtttgaagaatcttgtttaatgtttttagaaattttttctgctaatagtaagtattttggcatttctatctccttatcaatttttttataaaatatgagtataaaattaaagttataaatttaagttttcagtttttattgaagtgttatttattttttaaaattaatagagttttatgtaagttgcaactttttattattttaaagtgtgaactactttgaattatattctgagtaaattaataggttttatatgattactaaattaaactatgctcttctttaaaataaataagctcaatacttttaattattgagcttatttttaattgatttagtatgactgaagtatttcgctttaaccttaagtcattttatgggaactcttcattttatgaattttcccgcactttctgcattctctgacttcatcatgtgaaatatcaaaatcatattcccagatgtgcatgcagaaaaattgtctaatattatggagcatagacacctccttaaaaaaccaacaattatggaagttttttagaaattcagaattcttctagactcaattgtctaaaagggaaatttttcaccatatcttttttgaaaggtatgtgaaaaagcttaagttgaagcaaaaagaaaatatttcaaaatatcttatctccttactcaatgaagataagtaaaaggtagcactaatctatgtatctgtttttatagggaacaagtgagttctgtttacaatgaaaacttatgtgaagagattgagataaaaaagagattaagccacaaaaaaccgccccaaaaggcggttgctgaattttaacagctatgaatagaagtacggcagaaacccttctatatttcttatcacattatttttcttcgtttataattttcataaaagcttcagatttaaaatagttaataatcagttcaccttcatcatctggatgtgtagattttgctggtgtcttagcgttgtcaaattcgtaattaaacttaaaatcgggcggaataaattttgagataggtggaagatgggtttccccgcctgtcgtcattcgttctataaatccagctaaccataaaatatattcatctttatttttatgactaggcatgaggctaatatcaattttgacggcacattcatctagtggctttgttaaacattcgtcaaagtcaataaaattatatttaagcttaaactttgtacctttgatttccttacgaatcacacctattaggttatttaaatgctcggtcggagtatcagagaaaagatcatcttctttaatttttttatacaccttttcagcaatcattaaatattgtggcatttcctatctccttccttcctctttctggctggttgcttactcagctttttaaggaagtatgatagaaatcatgtgttgtaatgtagttgttggtaacttaattgtaagtaatgtaaagttatgaaatctgagtatctaataaaacgcatcttataacgacaaagagaactacgtcacttttttacttataaaaaacgtaaatgatcgaaataattgtttgcaataaaatacagctcacataattaggttgattagtcatatataactatagaaaatttaaaaaatattttataagctactgtttttattatattttaaattttactcttcttagattataacaaaatcatacagttattgtgaattttgacatataaattgcatataagaatgctcttatagctctaacttggatgcaaattaaatgcttacatgatcaaccagctatatgagcagtacagtactatggccttaagtgcttggggctttactgatttaccttcttatacagataaatatgatcctaatgagaaagatatagtgataaagacaaataattggttgaatgatgaggcagcagaggaaaaaactcagcaaggtcttactgcctttgtagctcttgatgacgcattcatgagtattgcatcacggatttatttaattagaaattcaaaggaaacgattgatctacaatactacatttggaccaatgattttgtggggaaccttattttacatgagctgctcaaggcagcggatcgtggcatcaaagttcgcttattaattgatgatcaaaacggtataaagcttgatggcatattaagaagccttttacagcataccaactttgaaattagattatttaatccttataaatttcgttacttacgtatcttcgattatctcttccgatttaaaaaagtaaatcatcgtatgcacaataagctcattattgcagatgcatcgattgcagtaacaggcggtagaaatattagtagtgaatattttgaagcaagtagtaagtttcaatttacagatatggatatcttattttacgggcatgcagtgcgacatgcccaagctgtatttgctgatttttggcaaagtaccctaagtgtaaatgcaactgacattatcggaacttgtgctgagcaccatttaaaagctttaagagagcactatgaacaactccatcacgaagaccatagcctcactgaagataagctttacgatgcgcagagttatttaaaagagcttttagagcataaccctattcaatggtctaaggcccattttgttgctgactctccgaagaaaatactgggcactgcaactgaacatgaaatgctttatggccaagtcttgtctattatgggtaaacctaagcaacacttagaattagcttcagcttattttgtacctacccaacaaggtacttattacttaaagcaactacgagttgaaggtataaaagtccgcgctttaacaaattcttttgctgcaaacgatgttgcgatcgtacatgccttttatagccaataccgtgtagaaatgcttaagaatggtattgaactgtatgagtttaaacctgttctggaacgacgacgtagaacgtggtacgaaatcgtaacaggcagcgttataccagcaaaaggaaaaaataagtcgagcttgcatgccaagttttttgatgtagatggcaaagtctttatcggatcatttaactttgacccccgctctacctatttaaacaccgaagtaggtttggtgattgagtccagtcaattacaaactcagatttctgtcatgttagatcaacatttacctcaagtagcatatcaacttaagctaaatagccaaggccaaattacttggctagattaccaagccaacggacaagtcattgaatatgataaagacccgggaaccagccgttttcagagaacaatgattaaagctgtctcttatttgccaattgagtggatgatgtaattttcttattacaagaaaccgatttccttaaagaatttctgataggcttctgcttttttctcgagagctaatggatatgctctagaagatgacggtaatcgatataaattaatatcgcggtctgcaaaataagttgatgtagatgtcccaattaagggtttttccgtgttctcaggtaaaactgagattaaggtatctgtggctttatcgcccgtagtcataatagtgtgacattgaggaatctgtttcaataaaaccgctaagtctgtcggagtgacaatttcaagaaacttatctgaagcattgccctttaggcgtttaatttgatacgccgtatcaaaaatagcaatgcctgtctcaatcagaaagttgcggatagcttcttcgttaaagcttttttggttctcacttaaaaaataagttttatcttgaaaaaagattaaaccaaaaattctccacatatcgttttgaaagttcggatagtaaaagtccatcttccatttattacgtggcggtggaaaacttcctaacattaataaacgggcattttctggcaaaaacggttgcagtggatgggtttctatctcaattatcataaaaaatcagtatttacttcaaaatttataaataacttaacgtattttaaggttaatcacgagtcaagaagtgcaaattatcttaattaaatgtattgaggcgaaacgtttagttgtttcgcctcaatcatttctaattttatattcatgctaaaaaccaaaaatatttaagaatttaaaactttaaagactttccctgttctgggatgagcaaaggtgttatcttgatctaaattgataactttatctgaaatcacaatcttggaaagcggtaaccagttttgttcgatttcagccgaagctaaatttttctccaatgtattttcaaaaatttgctctaccacaatttccatcccacacatacttttcgcattaacttcttttaaaatatggcgctttgacattctaatctccatttttttattcttaacataaaaaatagtaaagggtgttttgctacaatgtgtaaaatttaacatttgaagtgttttttttgttttaaacatatttatttaataattaaatgaatagtggaatatctttaaaaataagttttattattaaattaacttattaaagctatctttattttaagtaaaattaattttataaaaaataatatttaaagggctcacgtatgaacccttgcatttaactttaaacctggacagcattatcgagtgaattgtcatctttactcttattattatccttactaatcaatgagtcggtatcactatcagtagagaagctcttactgttcttttgctttttcttgtacatacacatgccaatcgcaatacctgttcctaatactaaaattgactttaacattttgcacctcttcaattgacggagaaacttctgagaaatcaacttaaattaatagcatattctttgttatttaagggctttcatttgagccgcttttgtaaggtatttaatttttatgttaattaaaaagtataatattttgagaaaataaattttgatacaaagcaaaaagcctattctcaaaacagaataggctttctactgtatttcaggattaagcagtattattaattgctttaagcaatcttatttatgtttaaatacaattccaatgtatttaatgctgaacttttagtcaagataggaaagcgatgatttgcaattaattggctattcttgtgatgaggttctcattttgtaattaagcaaaagaaaacgcccatttctacttctcaaaaagaaatgagcgtaagtgaaaaccactaaagacctgaaataccaaatgttcttacatttagtaatgttgattctaattaacttagcaattggttgacaattaaactagttgtactttttttagtcatttcggccaataaaaaatgtaaaataattcgctatttttaatatatttagcaataaattatttacttaggatgcgattgagcacggttagccagttagaaaaacaaattttttctataatctcattcgaataatgtcgcttttgcattgcttcaatcagtaggtgtagtccccttacatcttcaatttcatgactaatcagtgctccatcaaagtcagaaccaaaaccgacatgattttctcccatttgatctattaaatattcaagatgttctaaaattacctcaatggatgtgtttgcatcacgctgcccgtctttacgcaaaaatgcgacatcaaaatttaacccgactatgcctttagagtccttaattgctttaagttggttatctgttaagtttctggcttgtggacataaagcatgaacatttgagtgagttgcgacaattggctgctgaagaatgttagctgtatcccaaaaagctcgttcattcatatgggaaacatcaatcaccatttttttatcagcacagcgctttataaatgctttaccttcgtttgtaagccctgctccggtatcaggtgaatgcggaaacttggcatttaaaccatgtccaaaacgacttggtctattccaaagtggaccgatgctacgaagcccagcatcataaaatacatcgagtaaatctggattatgttgtaatgcttcagcaccttccatatgcaatacaatggctaacttttgctgtgttaggcagtgctggatatcctgaacagttgtgcaaatttgaatgtcgttagagtactcggcaagttgttttgctaaatcgagctgtgccaaacaaatgtgttcaatttgctgttgcgtgaagtcagatgcgtcttggtcaaatagtttgttgggatgatgctgcttaacataatgaaaaggcggcaagaaaatagcaaacataccgccaacaaaaccggcttgttggcaacgttttaaatcgagatgtccggctaaaccttcttgaataaaagcttgagcaggattgttataatcacttaaccacaatcgggttagtacatcattatggccatcaaaaacaggaaatgtgccatggttcatatcggttttctcatagctaatcatctacaatattttgaaccggaatgttttgttgaaccgtgaattgctttgaatttcggctattacggaataccaattttcccagagaggaatcaatttcgctctcggcacgtgcctgttcaatgagttgatgatacagcgatttaccacaaacagggtctgcgttacttgcgtcgcctgttaacatataagcttgacaacgacagccaccaaagtcgcggtctttatctgggcaactacgacatccttctggcatccatgcatcaccacggaagtggttaaaaccagtagactcataccagatttttgataggctttgttcacgaacatttgggaaagatatcggtaattgtcttgctgcgtgacaaggcagagccataccatctggagcaattgtaaagaaaattttaccccagccattcatacaggcttttggtctttcttcgtaataatcaggcactacaaaaataagtttgcaaggatgattttgcgcttttaacttttcccgatattcattggtaatacgttcggcacgtatgagttgttcttgtgtcggtaataaaccctgacggtttaaaaacgcccaaccataaaactgacaaattgctagctcaactgtatccgcattaagttctagacaaagttcaataattttatcgatctggtcaatgttatgccgatgaattacaaaattgaggaccatcggataatcatatttcttaacaagtcggcacatttcatacttttgttcaaaagcatgtttcgaccctgctaaagcatcattaacgaccggatcactcgcttgaaagctgatttggatatggtctaggccagcttgctttaaatgcgaaatacgctgttcggtaagtcccatgcctgaggtaatcaggttggtgtagaagcctagttggtgtgcatgcgccacaagctgttccagatcttgacgcaccaaaggttcaccaccggaaaaaccgagttgtactgcccccatttgacgcgcttgatcaaaaacatcaaaccactcttgtgtggtcagttcatttttatgctgtgcgtagtctaaagggtttgagcaatatggacattgtagcgggcaacgataagttaactccgctaataaccataaaggtaggccaacaccttctgtcatactaaatcaatccagtgttgttgctgggcaactaacatgtaatcaataacatcgttgtcaatttcgggtatatcaccaaattgttgcttgagctgggcaataattgcagaaacattatttgtcccatcaatatactgtccaatcgcccctgcactttcatttaatttgatcatgccttcagggtataaaatgacaaagccattttgagcaggctcaaattgaaagcgataaccttggcgccaggtaggcacaagatttacatcaaattgttctttattcatttaaatagtcctttgtgccatacccgttcttgagtcacgctatgatacggtgcttcattgtgtacatatgccagtgttaaagcatccaaaatgctccataaaatatccagtttaaactgtaatatttccagcattctttgttgttgttcatgagtagtaaatgaatcaagcgtgattgttaaaccatgttcaacatcacggcgtgcttgacttaaacgagagcggaaatattcatagcccttgtcatcaatccaagggtaatgctgtggccatgattcaagtcgagactgatgaatctgaggtgcaaatagttcagttaaagaactgcttgctgcctcacgccatgacgcacggcgtgcaaaatttacataggcatctacagcaaatcgtacacccggcaaaaccaattcttcggaaatcacttgctcacgactcaagcctacagcttcggctaaccgtaaccatgcttctcgtccaccgccatcaggatattcaccatcttggtcaatcatgcgttgaatccactcctgtcgcacacgttgattaggacaatttgccatgatcgcagcatctttgagcggaatattgatttgatagtagtagcggtttgcaacccaagcctgaatttgttgttgagtggcttttccttcatacatcatcacatgaaatgggtgatagatatgataatactgacctttatcaataatggcctgtttaaattgttcggtcgttaaagcttcaggtgtttgagtcatgtttcaccttagagttcaatttgcatgccatcaaaggcaacttctacaccatttgcttttagttcagcaaattgagcagagttttcatttaaaatcggattggtattgttaatatgaattagcactttctttggtgtactgagttggttcaaataagacaacgaaccgccttcaccactaatgtataaatgccccatttcacggccagtttttttccctacaccggtttgctgcatttcatcatctgtccatagtgtgccatcaatcatgacgcagtcagaatcttgcataatctgcatgatttgatcatcaatctttccaagacctggcgcatagaataactgcttctgtgttttatgatctttaataattaaagcaatattatctccctcatgcggatcatggcgatgtggggaatatgggggtgccgcgctttgaataattaatggtaaaaattctaaattttcgaaaccattaattttaaaagcttgtttaggatcaatttgatgatattgaagaccaccattccagtgtttcaacatattgaataccggaaaacccgtggtgagatcttgatagaccatttcagtacaccacacattcattgggcagccttcacgtaaagttaaaagtccagtggtatggtcaagttggctatccattaaaataacattggtaataccagtatcacgtaattttcgtgctggttgagccgctttaaaatcaaataattgttgacggatatctggtgatgcgtttaataaaatccagtctacgccgttttctgaaattgcaattgaagattgagtacgcactttggcattaatcgtacctgtacgaacaccatgacaattaggacaattacagttccactgagggaaaccgcctccagctgctgaacctaaaatataaatatgcataaaattaatatcttattagaaagacataagccctagaacaagactagggcttatgacagatttgaatagaaatgattaacgtgcttcaaagtacattgttacttcaaaaccaatacgtaaatcagtgaaagctggttttgtccattgcataaattttactccagtcagtactaatctcgtgaaatgaatcacttgattaaatcacataaggcaattaaaaatttattctaattaaaaatgccacgtttgtagataagctcggaacaagatattgttcgataattgtgttttttgtccaaattttaataaatcctgatctttcaaaagcatttgaaaagtcataacaggtcaatgttctgttatgacttatgccttacccagctaagttcatcaagtgttgctgtgcaatataaagttcttcttccggcttaggatgacattgcacccaagttccatcagcctgtaattcccatgcttgacgattgtctttcaaatagttgtttaagccatcttcaatgacttgtttctttaattttttattttcaattgggaagcaggtttcaatacgagagaacaaattacgttccatccagtctgcacttgcacaataaacttttgtatcaccatcattataaaaatagtaaacccgcgtatgctccaaataacgaccaacgattgaacgtactcgaatattctctgaaagtcctgcaacttgtggtctcaagcagcaaattgaacgaataattaaatcaatttttacaccagcttgtgatgctttataaagcgcgctgatgagctgtggttcagtaagcgcattcactttaatgatgatgtgtgcttttttaccagcaaggctatttttaatttcttgttcaataagttctaacagctgagaatgtaaggtaaatggcgcatgaaaaagctttttaagctttgccattttgcccataccggtcagttcttggaaaattttatggacgtcttcacaaatttccgcatcattggtcagcaaaccaaaatcggtatagattttggcattcactgcatgatagttgcctgtacctaaatgcacatatcttttgattttgtcttgttcacggcggaccactaaaatcattttagcgtgagttttatagccaacaatgccatacaccacgactgcgccagcttcttgtaaaacgtttgcgacttcaatatttgattcttcatcaaaacgtgcccgcaactcaataaccgcggttacttctttaccattacgcgccgcttctgcaagtagctgtacgatttccgagttggcaccactacggtataaggtttgtttaattgccaagacatttggatcttgcgcagcttcccgaaggaacttgataacaggtgcaaaagaatcaaatggatgatgaagtagaacatctcctgcttttaacacatcaaaaatcggttttttagtgtataaaagctgaggcaaaacttgttgatatggtttatagcgtaactctggtaaatcaaagtttgagataaaacgggctaaattaacggggccatcgacgtagtaaagatgttctgcatctaaatcgaattgctctaataaatagttagcaatttcttcaggacatttttttgctacttccaaacgaactgcttggccaaaacggcgtgaagataattcgccttttaaagcagcagccaagtcctctacatcttcagaaacggttaaatcggcatttcgagttacacgaaattgatgacagcccgtcgctttcatacccggaaataaatccgaaatatgttgatggataatggccgagagcagaatgtaatgctccgcaccgccagaaatatgttctggaattttaacaagtcttggtaacgaacgcggtgccggcacaatagctaaatcaatttgacgtccaaaagcgtctttaccttctaaagttacaatgaagtttagacttttattgaccaatcttggaaatgggtgtgctggatctagactgattggcgtaactacgggttgtacttctttaaaaaagtattctttaatccattctttatgcttttctaatatatcgccgtgctgaataaaatgaacgccatagccttggagttgcggtaacaaagtatagtttaagattttatattgctcttcaaccgcctcatgagcattttttgaaatttgctttaatacttctactaacggtaaaccttctggtccggttgcctgactcatcaagctaattttctggattaaacttgccacacgaatttcaaaaaactcatccagattacgcgaaaaaataattaaaaaattcaaacgttccagtaatgggtgttctatatctttggcttgagcaagcacccgtttatgaaactctaataaagatagttctctattaatatacgtttctaaattgtgctggtttgagctagctaaagtgggcaatgatgtcattcttgactcttatactgggtaaaaaagttaaaatgaataaaaaagattaatttattaatgtataaccgattttattcaccggacattttgtaactgctttattgcaaattcatgaattttttatgaaaaccttaaaattaatatttatttttgccttatttacttccttctagtcatccatatctaccatcatcttaacattaattttttaaagatcattctatttcgattcagtttcaattttcatcaaatattcatactctatgcgtattttttatgcatcttaattcatcaattgataaaaaatgacgactttaaacatactatttaagacaacatctttatgtctggcaatggccttattggtaggctgtaatgataatgatgacaatgattcaagcacaccagcaccgcgaagtaaccaaactgtaaatattttagctttcaatgactttcacggaaatttagaaccacctaaacgttacgttgaagcagcgaatccaaatgatgcatctcaaactgtacgtattcctgtcggtggtgtgagttactttgcagatgcaattaagaaacttaaagctcaaaatcccaataatgctgttgtgtcagcaggtgacttaattagtgcttccccactcacttcttcgttatttctagatgagcctactattgaagtcatgaatgatattcaaattgacttcaatgcggttggaaatcatgagtttgaccgtggtacagatgaattgcgtcgtttacaaaatggcggttgtcaacaatataccagcactgccccatgccaaattaataaaaactttagcggcgcaaaattcaatttccttgcagctaacgtggcaatgaaaaatgatacaagtaaaacgatttttcctgcctataaagtcaaaacttatggcgggattcctgtagcttttattggtttaacactcaaagcgactccaagtattgtttcagcggtgggtattaaagatgttgaattccgtgatgaagcagatacggtaaatgctttaattcctgaactccaaaaacaaggtattgaagcgattgtcgtcgttgtccatgaaggtgcagcgccaagtacgaaactcaatcaaaaaacatgtgatggcttaagtggaccaattttaggtattttagatcggttaaatccggcagttgatattgttgtttcggggcatacacatcagtcttatatttgtgattatgcaaccaagaatccagctaaaccatttttactaacctcagctggccaatatggcactcttattaccgatattaaggtggagttggatggtaaaactggcgatatcattaaaaaggatgctaaacaaattccggttcaaagtgaggcctatacttcgggtacaaccactgtaagtctgacagacctctatcaaaaatttagta

(The sequence listing continues in the following parts.)

1. A diagnostic method of determining an infection of a patient with Acinetobacter species potentially resistant to antimicrobial drug, e.g. antibiotic, treatment, comprising the steps of:
a) obtaining or providing a sample containing or suspected of containing at least one Acinetobacter species from the patient;
b) determining the presence of at least one mutation in at least two genes from the group of genes consisting of ABTJ_00846, ABTJ_03609, ABTJ_02823, ABTJ_01043, ABTJ_00276, ABTJ_01220, ABTJ_03349, ABTJ_00758, ABTJ_02830, ABTJ_03319, ABTJ_00275, ABTJ_02615, ABTJ_01710, ABTJ_01447, ABTJ_00199, ABTJ_03034, ABTJ_00438, ABTJ_03359, ABTJ_02996, ABTJ_03324, ABTJ_00328, ABTJ_02848, ABTJ_01046, ABTJ_01709, ABTJ_03172, ABTJ_03125, ABTJ_00081, ABTJ_03829, ABTJ_02822, ABTJ_02072, ABTJ_02327, ABTJ_01930, ABTJ_02481, ABTJ_02308, ABTJ_01573, ABTJ_00242, ABTJ_03452, ABTJ_03712, ABTJ_03035, ABTJ_03119, ABTJ_01813, ABTJ_00590, ABTJ_00252, ABTJ_03168, ABTJ_03301, ABTJ_00371, ABTJ_00222, ABTJ_03174, ABTJ_02522, and ABTJ_02797, wherein the presence of said at least two mutations is indicative of an infection with an antimicrobial drug, e.g. antibiotic, resistant Acinetobacter strain in said patient.

2. A method of selecting a treatment of a patient suffering from an infection with a potentially resistant Acinetobacter strain, comprising the steps of:
a) obtaining or providing a sample containing or suspected of containing at least one Acinetobacter species from the patient;
b) determining the presence of at least one mutation in at least two genes from the group of genes consisting of ABTJ_00846, ABTJ_03609, ABTJ_02823, ABTJ_01043, ABTJ_00276, ABTJ_01220, ABTJ_03349, ABTJ_00758, ABTJ_02830, ABTJ_03319, ABTJ_00275, ABTJ_02615, ABTJ_01710, ABTJ_01447, ABTJ_00199, ABTJ_03034, ABTJ_00438, ABTJ_03359, ABTJ_02996, ABTJ_03324, ABTJ_00328, ABTJ_02848, ABTJ_01046, ABTJ_01709, ABTJ_03172, ABTJ_03125, ABTJ_00081, ABTJ_03829, ABTJ_02822, ABTJ_02072, ABTJ_02327, ABTJ_01930, ABTJ_02481, ABTJ_02308, ABTJ_01573, ABTJ_00242, ABTJ_03452, ABTJ_03712, ABTJ_03035, ABTJ_03119, ABTJ_01813, ABTJ_00590, ABTJ_00252, ABTJ_03168, ABTJ_03301, ABTJ_00371, ABTJ_00222, ABTJ_03174, ABTJ_02522, and ABTJ_02797, wherein the presence of said at least two mutations is indicative of a resistance to one or more antimicrobial, e.g. antibiotic, drugs;
c) identifying said at least one or more antimicrobial, e.g. antibiotic, drugs; and
d) selecting one or more antimicrobial, e.g. antibiotic, drugs different from the ones identified in step c) and being suitable for the treatment of a Acinetobacter infection.

3. The method of one or more of the preceding claims, wherein at least a mutation in ABTJ_00846, particularly in position 884837 with regard to reference genome NC_017847 as annotated at the NCBI, is determined.

4. The method of one or more of the preceding claims, where the method involves determining the resistance of Acinetobacter to one or more antimicrobial, e.g. antibiotic, drugs.

5. The method of any one of claims 1 to 4, wherein the antimicrobial, e.g. antibiotic, drug is selected from sulfonamide, fluoroquinolone, lactam, aminoglycoside, polyketide, preferably tetracycline, and/or benzene-derived antibiotics, and the presence of a mutation in the following genes is determined: ABTJ_00846, ABTJ_03609, ABTJ_02823, ABTJ_01043, ABTJ_00276, ABTJ_01220, ABTJ_03349, ABTJ_00758, ABTJ_02830, ABTJ_03319, ABTJ_00275, ABTJ_02615, ABTJ_01710, ABTJ_01447, ABTJ_00199, ABTJ_03034, ABTJ_00438, ABTJ_03359, ABTJ_02996, ABTJ_03324, ABTJ_00328, ABTJ_02848, ABTJ_01046, ABTJ_01709, ABTJ_03172, ABTJ_03125, ABTJ_00081, ABTJ_03829, ABTJ_02822, ABTJ_02072, ABTJ_02327, ABTJ_01930, ABTJ_02481, ABTJ_02308, ABTJ_01573, ABTJ_00242, ABTJ_03452, ABTJ_03712, ABTJ_03035, ABTJ_03119, ABTJ_01813, ABTJ_00590, ABTJ_00252, ABTJ_03168, ABTJ_03301, ABTJ_00371, ABTJ_00222, ABTJ_03174, ABTJ_02522, and ABTJ_02797.

6. The method of one or more of the preceding claims, wherein the antimicrobial drug, e.g. antibiotic drug, is selected from the group consisting of Amoxicillin/K Clavulanate (AUG), Ampicillin (AM), Aztreonam (AZT), Cefazolin (CFZ), Cefepime (CPE), Cefotaxime (CFT), Ceftazidime (CAZ), Ceftriaxone (CAX), Cefuroxime (CRM), Cephalotin (CF), Ciprofloxacin (CP), Ertapenem (ETP), Gentamicin (GM), Imipenem (IMP), Levofloxacin (LVX), Meropenem (MER), Piperacillin/Tazobactam (P/T), Ampicillin/Sulbactam (A/S), Tetracycline (TE), Tobramycin (TO), and Trimethoprim/Sulfamethoxazole (T/S).

7. The method of any one of claims 1 to 6, wherein the antibiotic drug is one or more of T/S, TE, CFT, LVX, GM, IMP, A/S, CRM, ETP, CP, CAX, AZT, P/T, CPE, AM, CAZ, TO, MER, and AUG and a mutation in at least one of the following nucleotide positions is detected with regard to reference genome NC_017847 as annotated at the NCBI: 884837, 3727017, 2887795, 1071328, 291053, 1276055, 3455306, 777725, 2895753, 3425049, 289027, 2710849, 1757128, 1510433, 221638, 3110710, 447957, 3462897, 3068809, 3428448, 348383, 2919827, 1073537, 1755741, 3266655, 3218006, 88925, 3957911, 2887043, 2149065, 2407421, 1999549, 2572909, 2386045, 1620109, 257457, 3568404, 3834404, 3111752, 3212013, 1874583, 598913, 264905, 3261347, 3408240, 391624, 243000, 3268640, 2606811, 2859889, 3425108, 3425135, 3425138, 2710850, 348344, 348328, 348305, 88928, 1073545, 88943, 1755406, 2920142, 1073556, 3212079, 3212082, 3212085, 3112778, 2920152.

8. The method of any one of claims 1 to 7, wherein the resistance of a bacterial microorganism belonging to the species Acinetobacter against 1, 2, 3, 4, 5, 6, 7, 8, 9, 10, 11, 12, 13, 14, 15 or 16, 17, 18, 19, 20 or 21 antibiotic drugs is determined.

9. The method of one or more of the preceding claims, wherein determining the nucleic acid sequence information or the presence of a mutation comprises determining a partial sequence or an entire sequence of the at least two genes.

10. The method of one or more of the preceding claims, wherein determining the nucleic acid sequence information or the presence of a mutation comprises determining a partial or entire sequence of the genome of the Acinetobacter species, wherein said partial or entire sequence of the genome comprises at least a partial sequence of said at least two genes.

11. The method of one or more of the preceding claims, wherein determining the nucleic acid sequence information or the presence of a mutation comprises using a next generation sequencing or high throughput sequencing method, preferably wherein a partial or entire genome sequence of the bacterial organism of Acinetobacter species is determined by using a next generation sequencing or high throughput sequencing method.

12. A method of determining an antimicrobial drug, e.g. antibiotic, resistance profile for bacterial microorganisms of Acinetobacter species, comprising:
obtaining or providing a first data set of gene sequences of a plurality of clinical isolates of Acinetobacter species;
providing a second data set of antimicrobial drug, e.g. antibiotic, resistance of the plurality of clinical isolates of Acinetobacter species;
aligning the gene sequences of the first data set to at least one, preferably one, reference genome of Acinetobacter, and/or assembling the gene sequence of the first data set, at least in part;
analyzing the gene sequences of the first data set for genetic variants to obtain a third data set of genetic variants;
correlating the third data set with the second data set and statistically analyzing the correlation; and
determining the genetic sites in the genome of Acinetobacter associated with antimicrobial drug, e.g. antibiotic, resistance.

13. A diagnostic method of determining an infection of a patient with Acinetobacter species potentially resistant to antimicrobial drug treatment, comprising the steps of:
a) obtaining or providing a sample containing or suspected of containing a bacterial microorganism belonging to the species Acinetobacter from the patient;
b) determining the presence of at least one mutation in at least one gene of the bacterial microorganism belonging to the species Acinetobacter as determined by the method of claim 12, wherein the presence of said at least one mutation is indicative of an infection with an antimicrobial drug resistant Acinetobacter strain in said patient.

14. A method of selecting a treatment of a patient suffering from an infection with a potentially resistant Acinetobacter strain, comprising the steps of:
a) obtaining or providing a sample containing or suspected of containing a bacterial microorganism belonging to the species Acinetobacter from the patient;
b) determining the presence of at least one mutation in at least one gene of the bacterial microorganism belonging to the species Acinetobacter as determined by the method of claim 12, wherein the presence of said at least one mutation is indicative of a resistance to one or more antimicrobial drugs;
c) identifying said at least one or more antimicrobial drugs; and
d) selecting one or more antimicrobial drugs different from the ones identified in step c) and being suitable for the treatment of an Acinetobacter infection.

15. A method of acquiring an antimicrobial drug, e.g. antibiotic, resistance profile for bacterial microorganisms of Acinetobacter species, comprising:
obtaining or providing a first data set of gene sequences of a clinical isolate of Acinetobacter species;
providing a second data set of antimicrobial drug, e.g. antibiotic, resistance of a plurality of clinical isolates of Acinetobacter species;
aligning the gene sequences of the first data set to at least one, preferably one, reference genome of Acinetobacter, and/or assembling the gene sequence of the first data set, at least in part;
analyzing the gene sequences of the first data set for genetic variants to obtain a third data set of genetic variants of the first data set;
correlating the third data set with the second data set and statistically analyzing the correlation; and
determining the genetic sites in the genome of Acinetobacter of the first data set associated with antimicrobial drug, e.g. antibiotic, resistance.

16. Computer program product comprising computer executable instructions which, when executed, perform a method according to any one of claims 13 to 15.
